United States Patent Application Publication US 2026/0242758 A1, published August 20, 2026 (application 18/852,989).

The application's sequence listing, which the Patent Office published only in electronic form, follows.

SEQUENCE LISTING (1765 sequences)

SEQ ID NO: 1 - protein, 762 aa, Rhodomonas salina
MHAQLLRSIKARFPDCTRKSVVRSGDESPLRTPGKFEKAWRAKVTTRRLTKLIHNGCIILFGVRYHPGKGTSTSWSPFRIYWRPIATGVSRSNQDTFTSVDIMQRAKVTYFGGCGNMRYPTARKSHGYGASIIGFTRREAGLRLYTQNSAISDSSMTSCGIISKHRKFNKDKNFVNKRLINIIGDVQTLIVAYEFVKSKPGQMVKGSIDSTLDDIDLAWIKSISKVIKAGKFKFIPSRRIYVSKTGCKERRPIMTGFPRDKLVQKAIQLVLEPIYENVFLENSHGFRPARGCHTALKSIKQGFHGVTWVIESDIASCFSSVNHEVLLSIIKERIKCVKTLALIRNLLESGYVDLGAFCKSKLGIPQGSSLSPLLCNIYLHKFDTFMYELKQRFVYTSSKDPRINPAYKRLQRQIQNTPGLVEKSKFIQELRKTPSKDLFDPKYRRLFYIRYADDFSIGITGQKKDAVEILDQAKIFLSEELKMDLKESKIRVVHLKKQSIFFLGTTIYGISCVEKPMRTVKHSNWKTSIKIRVTPRVGLHAPMKVLLEKLLQNKFVKRDKEGIFKPTALGKLVNFDHADIIGYYNSVARGIMNYYSFVDNYSRLGSIVKYYLLHSCALTLALKYKLRFKSKAFKRFGGKLKCPDTKKEFFIPKNFFRTEKFSINPPDTEQVISKRWNNKLTKSSLFKACVICGTTPAEMYHVCKTRDLRNKYKTKKLDFFKFQMASFNQKQVPLCQFHHKSLHQGKLSEADKVAFREGITNL

SEQ ID NO: 2 - protein, 633 aa, Novosphingobium aromaticivorans
MLPDTIERAVRSLPTVIRSGRKVNGLYRLLKSPLLWEHAYQRIAPNKGAMTPGVDGQTFDGFSPDKVRSIIERLANGTYRPQPARRVYIPKANGQKRPLGVPTTEDKLVQEVVRTILEQIYEPLFSRHSHGFRPKRSCHTALESIRAIWTGVKWLIDVDVVGFFDNIDHDVLVSLLEKRIADRRFVRLIRGLLKAGYVEDWVFHKTYSGTPQGGVVSPMLANIYLHELDMFMQAKMAGFDKGKQRSPSPDARRIRNRLSYVRRTVDQLRAKGRGDDPRVTSFLEEIGRLKAERLAVPASDAFDPNYRRLRYCRYADDFIIGVTGSKSEARQIMEEVRTYLSDHLKLAVSAEKSGIHKASDGARFLGYEVRTMTNPNPHKAIFDGRPAVRRGLADRMKLLVPRDRVVRFVNSKEWGDYDSFRPVGRAALRFASDVEIVLAYNAEWRGFANYYAIADDVKRKLNKAGYFALLSCVKTIAGKHRTSARRVFAKLRRGTDFYISYEVGDTTRTIKLWQLKDLQRHTRTWGGIDIPSSAKFVFSRTELVERLNARECERCGSNDQPCEVHHVRRIGELQHAGFSRHMAAARQRKRMVLCSRCHNDVHAGQPTDRQRRTARSRGEPNALKGARSVRRGA

SEQ ID NO: 3 - protein, 753 aa, Arabidopsis thaliana
MASKETGMFSLAGELASLVEESSSHVDDDSKPRSRMELKRSLELRLKKRVKEQCINGKFSDLLKKVIARPETLRDAYDCIRLNSNVSITERNGSVAFDSIAEELSSGVFDVASNTFSIVARDKTKEVLVLPSVALKVVQEAIRIVLEVVFSPHFSKISHSCRSGRGRASALKYINNNISRSDWCFTLSLNKKLDVSVFENLLSVMEEKVEDSSLSILLRSMFEARVLNLEFGGFPKGHGLPQEGVLSRVLMNIYLDRFDHEFYRISMRHEALGLDSKTDEDSPGSKLRSWFRRQAGEQGLKSTTEQDVALRVYCCRFMDEIYFSVSGPKKVASDIRSEAIGFLRNSLHLDITDETDPSPCEATSGLRVLGTLVRKNVRESPTVKAVHKLKEKVRLFALQKEEAWTLGTVRIGKKWLGHGLKKVKESEIKGLADSNSTLSQISCHRKAGMETDHWYKILLRIWMEDVLRTSADRSEEFVLSKHVVEPTVPQELRDAFYKFQNAAAAYVSSETANLEALLPCPQSHDRPVFFGDVVAPTNAIGRRLYRYGLITAKGYARSNSMLILLDTAQIIDWYSGLVRRWVIWYEGCSNFDEIKALIDNQIRMSCIRTLAAKYRIHENEIEKRLDLELSTIPSAEDIEQEIQHEKLDSPAFDRDEHLTYGLSNSGLCLLSLARLVSESRPCNCFVIGCSMAAPAVYTLHAMERQKFPGWKTGFSVCIPSSLNGRRIGLCKQHLKDLYIGQISLQAVDFGAWR

SEQ ID NO: 4 - protein, 548 aa, Bacillus cereus
MNTSERASAHVSYTNWKAVQMYVTKLRQRIYRAEQLQQQRKVRKLQRLLMRSEANLLLSIRRVTQQNKGKRTAGVDEHTALSRRERNLLYEQLKKLNTLQHRPKPAKRIYIVKKNGKLRPLGIPTIKDRVYQNIVRNALEPQWEARFEAISYGFRPKRSTHDAIRSIFNRINGGTKKKWIVEGDFQGCFDHLNHEWILKQTSYFPGRKLLKRWLKMGYMEQSFFAETQEGTPQGGIISPLLANIALHGMEETLGITYKKNYKANDSYIMNPACKFTLIRYADDFVVLTETKEQALSVYMRLRPYLKDRGLELSPEKTKVTHIEEGFEFLGFLIRQYQTEQGNKLFIKPSKGSRQKAKKKIGDTLRVMRGQPIGEIIRVLNPIIRGYGQYWKHVVSKKIFGTMDSYIYWRIGKHLRQLHPKKSWKWIYARYYRHPHHGGNAWTPTCPKTNIQLLHMSWIKIERHNMVKFKNSPDDPTLKEYWEKRDRKVFDTENTMDRMKLARKQGYRCAICKTPLQNGEKVVVKDMPVPQHLILSNLNLKLVHLPCLY

SEQ ID NO: 5 - protein, 470 aa, Thermoanaerobacter ethanolicus
MDSKDMQRLQTTQQRGYPLDREMEFQKTTEVHSISSASRDGRNEVQRYTSKMLEMIVERGNMRAAYKRVVANKGSHGVDGMEVDELLPYLKENWPTIKQQLLEGKYKPQPVRRVEIPKPDGGVRLLGIPTALDRLIQQAIAQILNRVYNHTFSDSSYGFRPGRSAKDAIKAAEAYINEGYTWVVDMDLEKFFDRVNHDIIMSKLEKRIGDKRVLKLIRRYLESGVMINGVKVSTEEGTPQGGPLSPLLANIMLDELDKELEKRGHKFCRYADDCNIYVKSRSAGNRVMKSIKKFIESKLKLKVNEAKSAVDRPWRRKFLGFSFYTKENEVRIRIHEKSIKRFKEKVREITNRNKGISMENRIKRLNQITTGWVNYFGLADAKSIMKTLDEWIRRRLRACIWKQWKKIKTKHDNLVKLGVEEQKAWEYANTRKGYWRISNSPILNKTLTNKYFESIGYKSLSQRYLIVHNS

SEQ ID NO: 6 - protein, 420 aa, Bacillus thuringiensis
MQETKPFGISKNVVMMAFERVKANKGTYGMDEQSIEMYEMDLKNNLYKLWNRMSSGSYFPKPVKAVAIPKKNGGTRTLGIPTVEDRVAQMVAKLYFEPNVERLFYEDSYGYRPNKSAIQAIEATRKRCWRKDWVLEFDIKGLFDNIRHDYLIEMVKRHTNQEWVTLYVQRWLITPFQMEDGTLIERTAGTPQGGVISPVLANLFLHYTFDDFMVKEFSSIPWARYADDGIAHCTSLKQAKYLQRRLEERFKLFGLELNLEKTKIAYCKDDDRQLSYPNTSFDFLGYTFRPRHAKNKHGKFFTNFSPAIADKAKKAIRKEVRSWRLQLKADKTLQDISNMFNKKIQGWINYYGHFYKSEMYSVLRYINSSLIKWVRRKYKKRKHRRKAEYWLGTIAQRERKLFAHWKYGILPATNNGSRMS

SEQ ID NO: 7 - protein, 427 aa, Desulfovibrio vulgaris
MKKEKIDGWYKSGRNYLHFDEKVSFEKASRIVKNPRKVASWNFFPFLQTTVKTSKITRNDEGEIVPKNKSRPISYAAHTDSHIYSYYATLLQPIYEKFIEKHGLGTNITGFRKLDGECNIDFAHRAFNAIRSMTPCIALSFDVKSFFDEIDHSILKQAWCTILEKTLLPEDHFAIFKSLTTYSYVDRDDAFNAFGITKSSKKNGIRRICNPLEFRSILRPAGLIKRNKNSYGIPQGSPISGLLSNIYLFEFDKAISYFASDTKSHYYRYCDDIIIICNEEHEELFKNLVSDELKKLNLRTNEKNVIRKFFMGCDGPECDKPIQYLGFVFDGKRAVIRSASHSRFLKRMRKAVSLAKQTKRKRDKIRTSKGLETTSLHKKKLYTKYSYLGNRNYISYAHRAAKIMDEDAIKKQVKPLWKRLRQEIESD

SEQ ID NO: 8 - protein, 316 aa, Kuenenia stuttgartiensis
MSMKEFALNLSALYSAFDAVKENHGCAGADGVTIERYEGNLDLNLRIMRKELTEQTYFPLPLLRILVDKGNGEARALCIPSVRDRIVQAAVLQLIEPVLEKEFEECSFAYRKGRSVKQAVYKVREYYEQGYQWVVDADIDAFFDSVDYSLLLLKFKCYIHDPCIQNLVGLWLKGEVWDGKTVTTLKKGIPQGSPISPILANLYLDEFDEELTRNGYKLVRFSDDFIILCKNSGMAKESLKLTKKILEKLLLELDEEQVINFDQGFKFLGVIFVKSMIMVPFDRPKKERKVLFFPKPLDLEVYFKQRKQGKIWQTST

SEQ ID NO: 9 - protein, 383 aa, Shewanella putrefaciens
MKKYSLTPAMLEVCKEYNFFSDVSGFMPLTSENIKEIKIGKKFAYSHQDNNKPTHQKLSKIIFENFLSNIPLNQSAIAYVKKKSYFDFIEPHRNNYFFLRIDLKDFFHSISEDLLKRTLSDYFSSESLSETIKQSNIDAIFTFLTVNLKSDSSNVKFLDKKILPIGFPLSPNLANIVFRKTDLLLEKLCDMHGVTYTRYADDMLFSSRGIMEKNLLFRKNNNYKKPYIHSDNFLSEIKYLVSIDGFFINHNKTIKSVNTLSLNGYTISGTNFPDIEGKIRLSNKKTKIIEKVIHEININPDDKVTFEKCFKKEFPKPKYEKNRDNFINNLCTIKINQKLLGYRSYLISIIKFNNKFNCISESSEDKYNTLLSKIENVIKKRIK

SEQ ID NO: 10 - protein, 343 aa, Chromohalobacter salexigens
MEHTYYPHHPINSLKALNRALGIDEDEIFHALSNISYKEVPIKKKDGAIRVTYDATSALKVVQKKVTSNIFHRVNFPHYIHGCIRDTKTPRNIYTNAYPHAGCKQVILCDIKDFFPSIKAKTVFFIFRHCLGFSPNVSQRLTDLCTYNGTLPQGASTSSYIANLAFWDVEPLLVKKLESLGLTYTRFADDITISAKKSISKSLKTQVLHEVRRTIRKRGCSLKKNKTIVLKRSQVIIGKDKETQETTRNPITVTSLSIHHSSVTISKVERRKVRAFVDKLSKTEFNRVSYHEWCRRYSSAMGRVSRLISCGHKEGEPLKQRLKALKDEHKKFHQRSSNVSGRK

SEQ ID NO: 11 - protein, 309 aa, Leptospira borgpetersenii
MHTVHGNFFYKLSNKKRLAKYLRVSLKELLTLQDDSNYKVWSEEGENGKLREIQEPVYKLKSVHSKIQKSLASIVAPEFLFSGVKGKSNISNASYHKDGNYIVTADIQSFYINCNKEHIFRFFKYTLRTSDDIARILTELCCYKTFLPTGSPVSQILAYHSYARIFNRIDAFSKANDITFSLYVDDITLSSEKSIHRYILKTISKLLKSVNLSLKKEKTKFYNKNSYKIVTGCAISPDHILLRPNKIMRKIDNKLCKHEKDLSKLTPKEIESVLGQVIYLRSITPNSYPQLFKSLSLMKTEEKIKQRPL

SEQ ID NO: 12 - protein, 302 aa, Aeromonas hydrophila
MDKKAIYIERFLVYAPRKYRVYKIPKRKHGSRVIAQPTAELKKLQRAFINRSKIPVHECAMAYKDGVSIKDNAQLHSTNTFFLSMDFENFFNSITPDLLWGVFNKFGKVISPNEKLWLSKLLFWCPSKKNSNKLILSVGAPSSPKVSNFCMYFFDEYISTYCQDRNITYSRYADDLSFSTNEKDILFQIPGVVKETLLKLFGRDITINNSKTVFSSKAHNRHVTGITITNEGELSLGREKKRYIKHLIFRFKNGLLDVSDVSYLRGILSFAFYIEPAFKTSMVKKYTKATIDSIFNGVDDGK

SEQ ID NO: 13 - protein, 430 aa, Pelotomaculum thermopropionicum
MKILKIPKKNGKYRTIYAPDAEEKRALRGIVGILNQKCQHVCDPAAVHGFMPLKSPVTNALAHVGRKYTVSFDLEDFFDTVTPEKASKCLTKEQKELVFVDGAARQGLPTSPAVANLAATDMDRAILKWIEKSGKSVVYTRYADDLAFSFDDPELIPVIQKKVPEIIRRSGFRVNTDKTTVQAAVAGRRIICGVAVDDEGVHPTREVKRRLRAAKHQGNELEAAGLEEWCKLKVPSGKRQKARETTEGLDELRKHWKLRKIDMAKAVSRKVIPEKDLGDNCYITNDPAYFMGMSTFTTGWKSCMRMDGGEYRKGVMAWLALPGTSVAVFLSDRTMNIAGVERRRMRARCLVHKLENGQLVYDRLYGNPDDTPVLVKKLEEAGIRPIREFAGKGIYVEGDVPASMAMPYCDNLWEEKINIKSGKRVVRFYV

SEQ ID NO: 14 - protein, 298 aa, delta proteobacterium MLMS-1
MSITDLALAIGVSPRLITSFIHAPGNHYRHFNIGKRGGGERVISSPRTFLKVVQYWILDYLLHPLPCHPNCHSYQKGKSILSNSLPHVGKKYVANIDILNFFPSITERMVFDFLKKNNFGEQLSKSLSRIVTLNNGLPQGAPTSPVISNSFLNKFDEIISEKSLLLDVSFTRYADDITISGDRKENIISLIEISEHYLNSIGLKLNNKKTRIASKGGQQRVTGIVVNKTAQPPRKFRKNIRSMFHHAGMKPELFVDKINVLRGYVSYLQSFPNLYDGNEIKKYKKICATIQANFVQKQ

SEQ ID NO: 15 - protein, 349 aa, Fusobacterium nucleatum
MEWIEYREQFITTAKKASKNSGYIKKNLKYAEKLYNQKLPIIYNASHFSKLVGYSLQYLYAASNDSSKFYREFEIKKKNGGSRKISEPLPSLKEIQKWILENILNKIQKEKVSKYAKAYQKKISIKENVKFHRGQKKVLSLDITNFFLNIKIDKIYEVFYNLGYSKSLSTLFSNLCTLNYSLPQGAPTSPILSNIVMLNFDNEIEKIVLEKRIRYTRYADDMTFSGDFLEKEIIKYVKENLNKIGLKINNKKTRVRKNWQQQMVTGIIVNEKIQISRKKRDELRQTMYYIEKYGIDSFLKYKGIKNKVYYLSHLKGILEYAYFINKNDKKLFNYIEYLKNNFFKEKSSI

SEQ ID NO: 16 - protein, 257 aa, Salmonella enterica
MTIEVQRWEDKFEIKPGVWVYVPSVEARKVGGKILQAVRNKWIPPLYFYHLRTGGHLKAARLHLKSDFFAVVDIKQFFQSTSRSRITRDLKSYFTYSQAREISTFSTVRNLSHSPHKHVLPFGFVQSPILATLCLDKSYFGSLLRRLNKHHDLKLSVFMDDVIISSNNLAQLQAAYDEALVAMRKSGYQANMSKTQAPSSKISVFNLTLSKGVMKVTSQKMSDFLIDFYSSNYEPHRIGVKNYVEAVNPGQAKLFKL

SEQ ID NO: 17 - protein, 381 aa, Idiomarina baltica
MNRWSSRAFKKHNSDKPAAVVETAALYGRKIQTSCPELPVIFTLNHLALKSGVPYNNLRSFVDRTIERPYRSFTLRKNGLGSNPRKFRVIKVPQQDLKKAQQFINQNILSKMEPHECSVAFSPGSKIYDAASEHCNARWLLKFDIVSFFESITEKSVYRVFRRYNYPALLSFEMARICTALKARPPINWGGAPPNIRYRTIPGYSNKNLGTLPQGAPTSPMLANLVSYNLDRRLKLIADAYNCHYSRYADDITFSTDSSLSRGEVSRIIAMINSTLREYGHTMNKAKTTIAPPGARKFYLGMNIHGDSPQLRKSFKRKLKQHLFFCEKNSVGPEKHSKHLGFVSVIGFKNHLRGLINYANQVDTVFGENCMKRFQSIDWPL

SEQ ID NO: 18 - protein, 338 aa, Staphylococcus aureus
MEKIENEIVNKTYLAINSLEELRNMIGIKSDYFYKCLYVNDHFYNVIKIPKRKKDEYRELMIPNMALKNIQRWILDNVLYRRQVHKCATGFVPRKSIVNNAIPHVGQKYILKMDIENFFPSITFKQVRKIFSEMGYKFELATALANLCTVNNQLPQGAPTSPYIANIIFYNIDKRIFSYCQKNNLRYTRYADDITISGSNKVSFSKEIIREIVNQYNFRINESKTIMFKPGDRKKVTGIIVNEKISVPKTLIREVRKQIYFVNKFGLEEHLIRNNYSLDYEQQFIMSIYGKISFIKMIDFKKGVSLQKKFNEVLGNIESSNMYRDNIDFDDIELHWIN

SEQ ID NO: 19 - protein, 485 aa, Myxococcus xanthus
MTARLDPFVPAASPQAVPTPELTAPSSDAAAKREARRLAHEALLVRAKAIDEAGGADDWVQAQLVSKGLAVEDLDFSSASEKDKKAWKEKKKAEATERRALKRQAHEAWKATHVGHLGAGVHWAEDRLADAFDVPHREERARANGLTELDSAEALAKALGLSVSKLRWFAFHREVDTATHYVSWTIPKRDGSKRTITSPKPELKAAQRWVLSNVVERLPVHGAAHGFVAGRSILTNALAHQGADVVVKVDLKDFFPSVTWRRVKGLLRKGGLREGTSTLLSLLSTEAPREAVQFRGKLLHVAKGPRALPQGAPTSPGITNALCLKLDKRLSALAKRLGFTYTRYADDLTFSWTKAKQPKPRRTQRPPVAVLLSRVQEVVEAEGFRVHPDKTRVARKGTRQRVTGLVVNAAGKDAPAARVPRDVVRQLRAAIHNRKKGKPGREGESLEQLKGMAAFIHMTDPAKGRAFLAQLTELESTASAAPQAE

SEQ ID NO: 20 - protein, 361 aa, Nostoc punctiforme
MYSQNLTTIPLATESNLERLETDNLALLRSHGLAEYNTAEEIAFAMVISLEKLHFLTTSTSLTRHYLPFKISKKTGGKRIISAPKPELKAAQRWILENILEKLEVHNAAHGFCKNRSIVTNAKPHVGANVIVNIDLQNFFQSISYKRIKELFSGFGYSESTATIFGLICTTAEIAINGQINHTASENRHLPQGSPASPAISNLVCRNLDIRLAAIAENLGFCYTRYADDLTFSTSEDASSKISNLIKNTKFIIHGENFTVNDNKTKISSKSVQQEVTGVIVNTQLNISKKTLKAFRATLYQIEQEGLSGKSWGKSTNLIAAITGFANYVAMINPDKGAEFKSSVERIKQKYGGSQTDEVRF

SEQ ID NO: 21 - protein, 383 aa, Burkholderia phytofirmans
MAGMPGFVSAWRSEQPPRVVRVLTRPPFQRPPPPWLHDVALPQLPTLGDLAAWLDIEPGDLGWFADRWRVPTRGAATPLHHYAYKAIEKRDGRCRIIEIPKPRLRALQRKVLSGLLDRIPAHESVHGFRHGRNIVTFAAPHVGKAVVMRFDLTDFFASVHAGRVYSAFYALGYPQAVARALTALCTNRIPSGRLLAPDVRERIDWRERQRYRNRHLPQGAPTSPALANLCAFRLDLRLAGLARSVGATYTRYADDLAFSGDEELARMADRLCIRVAAIALEEGFGVNLRKTRVMRRSARQHLAGVVVNSHANVARPEFDALKAVLTNCVRHGWRSQNRDDLADFRAHLAGRVAHVAMVNAVRGARLRAVFERIEWEEEKPLDA

SEQ ID NO: 22 - protein, 370 aa, Bacteroides fragilis
MELLLGIVIVVTCWMVVRIIRSSKNQEGYKRWRAGNYASENPYAKEKASGPLSQGLFSKRVRTTGARRFDDGAIRWCANLLATEESRLREVLDYIPRQYTCFHVRKRSGGFRYISAPAGDFRSMQQTIYHRILLLANIHPAVTGFCPGKSVSDNARVHLGRKNVLKVDLHDFFPSIRSPRVRAAFREMGYSRPIAKVLAELCCLRCCLPQGAPTSPALSNIIAYPMDKKMMALAGEYGLVYTRYADDLTFSGDYLPKDEVLVRIHRIIREEGFTMNVKKTRFLSEHKRKIITGVSVSSGKKMTLPKVKKREIRKNVHYVLTKGLVGHQEHIGSTDPVYLKRLLGSLCYWRSIEPDNRYVSDSITALKRLM

SEQ ID NO: 23 - protein, 563 aa, Listeria monocytogenes
MKTLKNIEDRKDLADYLNIPIKRLTYILYIKRTENLYYSFEIPKKSGGVRNIDAPKSELKALQKKLAASLTKYQEILQKSKRKAPNISHGFEKGKSIISNAKIHRNKKIVYNLDLENFFESFHFGRVRGFFEKNKDFELSTEVATIIAQLSCFNGALPQGAPSSPIITNFICRIMDMRILKLAKNYKLDYTRYADDLTFSTNDKKFIDQIDYFLHKLTKEIEKAGFKLNKNKTNLNFKDSRQLVTGLVVNKKINVDRRYYKETRAMAHRLYKTGEFQIDDKNGTLNQLEGRFSFINQVQRYNNVIDSSKHDFNNLNAFEKQYQAFLFYKYFYANNKPHIVTEGKTDINYIKAALKKHHLEFPNLIVKKEDGEFDFRVAFLKRTNRLAYFLNIKKDGADTMKNICKYFFDIENNEVPNYLKTFKILTKQIASNPTILIFDNEISNNVKPVSKIIKYIKLKEDSRVMLTEKSYLNLEDSLYLLMNPLVKNKKECEIEDLFDEATLNHEINGKKFSREKNMDLNKYYSKERFSNFIYNEYREIDFSNFKPMLENLNFIIENYKNEK

SEQ ID NO: 24 - protein, 456 aa, Escherichia coli
MDHFSSVVDNYILQTNKDGHYCWRPFELIHPAIYVHLVHKITEDESWQLLLERFGEFQSNTKIVCASLPRESEEDGVSDKAKAVSGWWRDVEQESINKSLQFKYLFSTDIANFYPSIYTHSIPWAIYTKEDAKAARGAGRNLGDQIDYALRQMRWGQTNGIPQGSALMDFIAEIVLGYADELLGQKLESQNINDYHIIRYRDDYRIFTNSKEDAEAIARHLTVILQGLGLQLNASKTSLTEDLVLGSMKPDKQEALMVFGRSVNATTIQKTLLKLVIFSRKYKNSGQLEAYLAKINKRLERMSSIKEEVRAIVSIISDLMINNPRTFSSCALVLSNVLKFVDNDVEKLELLKQIKDKFKPILGTGILDIWLQRISYHINRDIEYKETLCSIVSGVHDRPHEHVWNSEWISDNNFKNSIMATSFVDNDKLQACEPIIPEEEVTLFPYDSDVDEEDLE

SEQ ID NO: 25 - protein, 542 aa, Bacillus sp.
MKDLTAKDLIGKGYFPKEIPKGFSTNSLAEKFSNLDFSTFTKKERGKWYKTSNISIPKFAHSRRILNVPAPFPQMRLSQLLVKNTEELNEYYSQSKLSLTRPIVKEESDRAVERKYHFSKIIERRIESINDKKYILKTDISRYFPTIYTHSIPWALHTKEVAKQTRGDSLLGNTIDEYVRNIQDGQTMGLPVGPDTSLIISEVIGTAIDIKLQEAHPNIIGSRYTDDFEFYFKTQSEAEKVLNTIQEIVRHFELDINPVKTEIISSPNLLEPIWLSNLKLYQFRSSATAQKNDIKTFFSTAFYYQNQSPYEGVLKYCLKKIKNLKIKEDNWSLFEALILHIMLIDPTTLPLIENILFGYKEIGYPINEQKIKDTIAEIFASNIAVGNNYEIMWALSLSNKLQLKISNESSKLLFNLEDSFSNILTMEAYTNGYIEGGYEPEYFKTLLNENELYGRNWLFAYEMSVKGWLKPHQQKEYVKKDTFYNQLFESKVEFYHNDRKAEIKNDDWLTALLNDDDIEELFIQNASSKKPYLRGGSGGADY

SEQ ID NO: 26 - protein, 350 aa, Bradyrhizobium diazoefficiens
MKASKLRPRDFLQCLLSTAYLPEELPPTVTSREYSEFCRRNYALVRAEKDKLIKLATSYDTYSAPRNVPGRRALAVVHPLAQLGVSLLITERRAEIRSLLKKSGTSLYDVSEAAAQAKAFAGLDFQKRRTLAAKLHSEKPFILQADISRFFYTAYTHSIPWAVLGKEKAKELLRTNRKKLNAHWSNKIDEALQSCQSRETFGIPVGPDTSRVLAELLLSGVETDKSLSKYLQPTNAFRLLDDFSIGFDNEADARQALRAIRQVLWRYNLQLNEEKTKIITSPLIFREKWKLDFDKAPLSQIDPQQQLRDIEYLVDLALNACFESRGNSGSMGLPPPKSGDSSRRHLSHLA

SEQ ID NO: 27 - protein, 488 aa, Kuenenia stuttgartiensis
MAPDKDFVLIALLKYNYFPAHKKEKEELPPIFSTKQFTKKIAQKLSHLRSRKDGYDQISYKITRYNNIPRVLSIPHPKPYADIVFCLSENWDNLAYICNNEVSLIRPRQHKDGRIIIMNYEGSHEKIERSLKKSFGHKFCIETDITNCFPSIYSHAIPWALIGLKEAKSRKRYKNEWFNKIDARQRMLKRNETQGVPIGPASSNIITEIILAKVDEVMSKDFNYIRFIDDYTCYCKKYEDAEEFARRLSQELSKYNLTLNLKKTHIHQLPKPTNDDWIIDLKSRISGDSKKITHYQAVNYIDYAVSLNKKIPDGSILKYAFKSIRGRLNVKDERFCLNYILLLAPHYPILIPIINKMLHNASKKDKFVYEKELKYILDESIVNHRSDGMCWTLYYLLKNKVTLSPEIAKHIIATKDCMAILMLYLFKKFDTEINGFANGLDKTDLYGLDNYWLLLYQLFYDNKIKNPYKDEETFKILKDNNVNFIQSK

SEQ ID NO: 28 - protein, 645 aa, Roseobacter denitrificans
MSNIDDRMREVRAVLTETLPFELPLGFTNENLFLSELRLDQMTGVQQNYLNRLRRPHNNYTKPYLYSINRSRRSKNTLGLIHPAVQLRIATFYSEFEQTIIQACGRSTFSIRHPYEALRIYSKDSAKDVRKRWKLALPGENVGHAIKTSYTSSYFAYRKYLLLDKFFSSNEIIRLEGKYSRLRMLDVSKCFFNIYTHSISWSLKDKDFSKKNAKNYSFEQQFDTLMQHSNYNETAGILVGPEVSRIFAEIILQRVDVELERAVSKRLKLECGRDYDIRRYVDDFHLFANDEDVLDKVEGVLAEILETYKLFLNTGKSEEVERPFVTGISRLKFEVSGICAKLYDELTVDLSNNEESSAEARETLRKARVSLDALRHIGGTERALLPSAMSEVFTTLSRIVRSLNKMTELDLSEAQSEDLIARVKTVVRVLFYLSAIDFRVPPIIRLSLILKEVVRLSKKLAQPYRETITGYLVYELSELMATHYVEEAEAVGLEVANTFVLGLVVEPALFAMQESSAKFLHNVLTGKHKCYFSVLCALHALNSVENIKEDEKNAFVDGLINRILSNDFEIEVSCEEYLIFCDALSCPAIDRDVRWQTFQDKLGGQGLSKAAFDELALCFRHINWDANGPGFELVQRRLPPVYFSG

SEQ ID NO: 29 - protein, 525 aa, Desulfitobacterium hafniense
MPMLKLAERSLDWALLHIEKYGDTDIFPVPFEFEAIRYQWEQSMRSWLRSQDILQWTPRPYRRCLTPKHRYGFRVATQLDPLETIVFTSLVYEIGKDIESARIPKEEKIAFSHRFAAKPDGRMYDSEYSWDLFQDHCGELVESNDYRYVVIADIADFYPRIYFHPLENALSECTRKKNHIKAITSMIKNWNFSVSYGIPVGSAASRLLAELVIDDVDRGLLSEGVKHCRYVDDYRIFCKNEREAHEHLALLANTLFENHGLTLQQHKTRILPIEEFYNHYLQRENSQELNSLSAKFYHILDSLGIENRYEDIDYDDLAADVQAQIDNLNLMGILKEQVLETEAIDIPLVRFVLKRLKQIDSEESVDFVLDNINQLYPVFKEVITYITSLRSLNTADKHEIGKKLIQLLEDSIVSHLEYHRLWVFDTFTKDREWDNEGKFVNLYNSYHDEFSQRKLILALGRAQQHSWFKSRKRTVNQMSPWLKRAFLAAASCLPGDEAEHWYKSLQGSLDPLELTITKWVQANPF

SEQ ID NO: 30 - protein, 562 aa, Erythrobacter sp.
MQSNDEVDYIVDPAFWLNGQALGFPVNFELVLKHLRQDMRDDWYYDCLQYDDLFKDPSEAKRIIISLLQEWNGEYRGTRSVVRNIPKQGYGERYGLETDFFDRFVYQAICSFLIPFYDPLLGHRVLSYRYEPTPIKAKYLFKNKIDRWFTFEGVTLTFRKSGLYLLITDLSNFFENVSREQIIKALEQAVPNLLATGPQKLHVRNAIATLDRLLGQWTYSGDHGLPQNRDASAFLSNILLSNVDRKMAEKGYDYYRYVDDIRIITDSETHARRGLQDLIRELRTVGLNINAKKTEILAPDVSDEKVAKYFPSQNSSTIAINQMWQSRSRRVVTRSVTYIFEILSKCIAEWDTQSRTFRFAVNRVAKLVDSGLFDVGDALSVELLDTLSQSLSEHAVSTDQYCRLIATLDHGGRCLPSLEAFLLAEDGAIHDWQNYNIWMLLAVRQHRSDDLVALAERKLQADMKSGEAAAILIWLRCVDEKALIARCLEEFANLPFQNARYLLISASVLEEEVLRPLYGHVPTGLRGTGHRTQRHCNEDGLPFAPRENTDLLNLIDEISGYD

SEQ ID NO: 31 - protein, 605 aa, Flavobacteria bacterium
MLTDRFHQIRKEELENLFSKKNISDVWRKIVRDQLRRVDILDTFDYYDFNYNIDERALLLRTVLLNGNYQPSQPLIYRIEKKFGICRHLVIPHPLDALVLQVITENISQQILNNQPSKNSYYSRDKHNLRKPHEIDEYGYHWRRLWKKMQKQIYQFKEEKELIIVTDLSNYYDSIYIPELRKVISGFIDKKESVLDILFKIIERISWLPDYLPYTGRGLPTTNLEGVRLLAHSFVFEIDEVLKSKSNESFTRWMDDIIIGVNSRTEAVNVLSSTSDMLKSRGLALNLKKTNIYSSKEAEFHFQIEENQYLDSIDFDYHIEHGIRKIGSELSKRFTKHLKNNVSAKYSEKITKRYITSFAKLQSKQLLKKVPVLFNEIPGVRGNLLYYLSSLGFSKRTSEIVLNILKELKLHDDISLFNVCKLVTDWEIPITKESDAFIKAFIKQVKSFSIQRKQPFDFYCLIWVKTKYEHPDELLKFINDYDYIWKTHPFLRRQVTSIMGRLLNYRKDEITKFLQSQIATSEPQVVSVANSILEFSKIKTVEQKVKMYLFPQSKYRTYPYQKFLVLCSFLNSEVYSKNEDIKKKVLENISDPYYLKWLDYQYNIK

SEQ ID NO: 32 - protein, 448 aa, Bordetella parapertussis
MQVTLLREERMRSFLSQVCDQLNMRWAWEKVKRASVPGDIWIDEADLAHFEVHLGHELRGLGDDLLSGRFRMSPIRPMVFPKNPDGDGNPRVRQYFHFTVRDQAWVAVVNVLGRYIDEQMPVWSYGNRLFRSAWIEEDIHGNKIRKIGPYRHSSGRIYRLFQQSWPLFRRHIALAVSAAAHGYSKVDSLDDDEREELGFQRRMHRANQCPFVLADYWTNLPTGPNESDVYWASVDLEKFYPSIPLTACVDAISQFVPAELRPEVQRLLKTLTQLPLNLDGWTDAELKHIELDESRKTFHKIPTGLMVSGFLANAALLPVDQEVQKTLPRGRVAHFRYVDDHVILTKTFDDLITWIDHYKDVIDNLGSGASINPAKTEPKALGELLGTSDTSKRFAGSDLWNRAQKECRLDPEFPTPLMTKTIALVSAIGKTDFTALEDNELSILPQQL

SEQ ID NO: 33 - protein, 1301 aa, Burkholderia lata
MLLPTLRGHATFGVDVRHTQKITGHGMTNKTDKYAALAPRIEYLSDVVVLSQAWKKTHTYIRHHNWYADTLELDCSAVNLDGELSQWSAELRDGTYTPKAARLVPAPKSDPWVFGDAEINGWAPVSSSEHFLRPLAHVGIREQTIATAAMLCLADCVESAQGDTSLDALDAQKAGVFSYGNRLFCSWTDQGARARFSWGNSNVYSRYFQDYQSFVERPLLIAQSAVLSGQDALTLFVIKLDLSAFYDNINIEGLVEKLTELYWRYSETIAPTAKTSSARFWATLAKSLSIGWQVEDAKWAPYLKGQKLPSGLPQGLVSSGFFANAYLVDFDEAVGESIGRSFNRRGVKFRLHDYCRYVDDVRLVVSCDKQVPSEEELGLALTEWVQARLDSKANDVEFEERLVVNEQKTEVQPFASLGGESGTAARMKSLQSQLSGPFDIAALQHVEAGLNGLLAQAELGTAAKQKVDGGRNLPPLASVVRPKREVRDDTLTRFAAYRLTKALKLRRKMTDLTQDEEAGLSRNILLHDLEVAARRLVAAWSLNPGLAQVLTYALDLFPCPELLKTITDALLTKVLGTQEDAYSTGTALYTLAQLFRAGASQTGKYWESDGSLQVGDVERYRLELGQLARMLIDEGVLPWYVRQQALLLLASLSQVITLDTSFDELPYHRSLHEFIGKRVDEGLPHIEETIAVSLVGHQLLRDDAHYAMWFAALSRQSTRKDRLIALELLAQNQPHLLRVIAASRSNRQLAAEPAFQSIVRYFSSFKEPEDECALVDGEWLSFGDIVKMRDTPFHEENALLQLAFALADAVSRTDELPEQWTPQTIQVRCEDWALLSDPRGMPRLSIRIGPTRGRRDPRYRTPEWCNSEDAILYAIGRVIRCAATGELDFTARQWLLREENIGWYRGISSTWKKRQIGMLNTSVAMAGTTAAITPWFSELLLRLLRWPGLQAQLETSSSVGVVTDAAMLRDLVHERLKAQAALFGKSSNLPIYVYPVDWPIDESRLLRVCVIQGLLPTTKDFDGGLASLHKEGFRARQRNHTASILYLAYQQLQARDSVLGKDHKPYVDLVVLPEYSIHLDDQDLMRAFSDATGAMIFYGLCGATHPVTSEPINAARWLVPQRRNGGRSWVEVDQGKKYPTTEEETLGVKPWRPHQVVIELSSGGAGKFRISGAICYDATDISLPADLRDVSHMFIVSAMNKDVKTFDSMVGMLRYHMYQHILVANAGEFGGSTAQAPYEQEHKRLISHNHGSDQISVSVFDVDINHFGPNLQATKVTLDPSGKKKRIGKTPPAGLMRDSVQ

SEQ ID NO: 34 - protein, 316 aa, Aeromonas hydrophila
MRPLAHVSIKDQTIFTALMMLLANHVETEQGDTSTSFYDVHAKGLINYGNRLHCKYSDNNAIYSWGNSNTYSKFFTDYQRFLERPIHFGREAKRVKTSKEEIYEIHLDFSKFYDSVNRGILTKKISALVEKITGAETDECISHVLSKFRNWKWTEKSKELYTGVCKNKHIETLKDNRGIPQGLVAGGFLANIYMLDFDKAISKLIGQYLDDNETILLIDACRYVDDLRLIIKADKNEVSENKIREVITTRFKSYYDELELILQPQKTKVKKFSSKDGAISSKLAHIQNKISGPMPLHELDEQLGHLEGADRTNRQP

SEQ ID NO: 35 - protein, 337 aa, Prosthecochloris aestuarii
MKRVGLLFERVVAFENLLHATRQAARGKKSQLRVAHFLFHQEKECLRLQTELKQGIWQPSGFRVFEIREPKPRRISAADFQDRVVQHALCNILGPLCERRLIFDTWACRRGKGSHLAMKRAQAFSRRFPYFLKCDIRRYFDSVDHTILKRLLWRLIKDKPVLNLLDRIIDHPLPGALPGKGLPIGNLTSQHFANLYLGELDHQLKDRMGVKAYLRYMDDMLIFADDKSRLHELVTGIEDFVKQHLQLSLRPSATLVAPVSEGVPFLGFRIFPGLVRVNGQALRRFRHRLRLHEKAYQTGKMDVESLTASVQSMIAHLQHADTHRLRQSLLSSSCALG

SEQ ID NO: 36 - protein, 362 aa, Psychrobacter arcticus
MFFLRIVMKRIGNLYESVVSGESLWEGYLGAKKSKGGRRGCFQFEKSLGRELNELQEELANNTYKPRPYFKFIVYEPKKREIYAPAFRDCVVQYAIYLRVMPIFDKTFIDQSFACRTGLGTHKAAEYAQDALRRAGPNTYTLQLDIKKFFYSIDRPTLRKLLERKIKDKRLVDLMMLFADYPEPKGIPIGNLLSQMFALIYMNPVDHYATRVLKPAAGYCRYVDDFLLFGLTRAQALTYRKLLTDFVEQKLKLTLSRSTIANTKRGANFCGYRTWRSGRFIRKHSLYKTRKAVRANKLESVISHLAHASKTHSLQHLLNYAEQQNHGLYCQLPKIYHTRHHQAVERSGRINGVMRNRCSNVC

SEQ ID NO: 37 - protein, 1000 aa, Bacteroides fragilis
MIDNKLFTFQQIYEAYRKLKSYIYYDNTSLFIRKEFSSFESSILAGENFEDNFKKKMKSLYDILNSDNYQTDLDKLVSKIGYKLVPKSIKKKESTIVTNIPHTGKIEVESYNILIDAPIEIHIISVLWLIVAGKELCKYVNENNYAYKLLLLDESYLPMTDIKIETNKENYVVTGLQLYEPYFIGYQNWRDNALNSATKLLDDNKDATILSLDIQRYFYSVRIDLDSIKNRCSHSNKQIEKCFHLLQIINKTYTSKINKLLDIPLTNDELNAGYTILPIGLLSSGLLGNLYLEDFDKTIKEELNPAYYGRYVDDILFVFSDRKVKLEVNNPIHDFIDRYFIKKNILETILDENNITYLLPVGSHKLKIQSEKVILEHFNHKESRAAINIFKKNLDKNRSEFRFLPYEENIDNEFDNEAFSMHYSDSINKLRSIKEFKEDKYGASKFLAHKIFLSKISPNEKDYNRKYFFQSSKQILTFFKGSTALSLYTLWEKVATYFVINNESKCLIIFYNQVLNTINNIKTVNGENKIKEDLKEFLFISIAMPISMRMNIKIDNNNDDVVIHKLADDIRKTNMFRQNLLGISCINYTDYIDHITNDLFHINIKNIKDLKIQINIAKFISPRFVHYHEFNILNIYQVFSSINKESDIRLFDKIQDIAFNQYKEFNYDWRFLYSNTDPIYPKDFFTLTQSENSNCKNINILEDNEVECNKKIGLANIEVSENDILSAIKMIPNISKERRKRIFEIMNYSHKKHVDLVVLPEVSVPFEWIDFFAEQSKNNNIAFIIGLEHVVSSYNFAYNFTATILPIKQKEFTTCLVRIRLKNYYSHSEKELLKGYRLINPSEIKPELKLYDLFHWRKSYFSVYNCFELANISDRALFKSKLDFIVATEYNKDINYFSDIAGSWVRDLHCFFVQANSSQYGDSRIVQPAKSDFKNMISVKGGKHPVVLIDELQIDKLRDFQNKEYNLQKELIDKEKTHLKPTPPDFNKDNVLKRIKDEPI

SEQ ID NO: 38 - protein, 423 aa, Pectobacterium atrosepticum
MREQSFDKFSLSKRIKQSDFYKCKNLVDEKVFDQVIEESYQLAHGLTAPVISKTISKGKEVYYVDRLSYKLILRKLQGNIRNKIETDKLQRNEIVRNLVSYLQEGVKSKVICIDLKSFYESIDIDSLLSETAKIGSLSYHSKKLIEVVLDEHRSIGGKGVPRGLELSSLLADLYLQEFDEWIKRIDGVFLYKRFVDDILIMTDHKVDEQSILTSIKNKLPANLCINNLKTQIIEIKKRTHSPNDVEGKLAATIDYLGYKIKVIDTHIPPAANGASSEGKANSVYRKVVIGVSDKKLNKIKTKLCKAFYNYELNRDFTLLLDRIIFLSTNRLLINKDKNRKMPTGIFYNYPLVNDDNESLKVIDFYIRALILGSGCRLSKKLNGSLNNGQVKTLLKISFAKGFSNKIHKKYSLNRLKEITRIWK

SEQ ID NO: 39 - protein, 349 aa, Caenorhabditis briggsae
VGRHEKNSVLEISFKYAPRGVELVKARSEGAAPLPTEPRGQRESARPIAYIKARTTAVRRVTLSVVHRYGRMHTLATKKLRKISCPPTFKKETKFLKSSEIEKFKNSQKKVFDVEALYTNIDNRAAYQAVVDKLKKNASVIDWYGDSFTHIKMLLKSCLEFNGFQFDGRIYEQKRGLAMGSRLAPVLAVLYMDIIETPSKVHPIILFRSYIDDYIVVAESQDTLDNIFTCLNSQATHIRLTREAPKMDWLSFLNCELRFKNKVFSSRWYRKPSNKNLLIRMDSGHPKQQKINTISTTQKTATENSTIDQRSYSRNLANEGNFDGKKNRLSNAKKSENFRSSLQNRIDFV

SEQ ID NO: 40 - protein, 394 aa, Schistosoma mansoni
MDVEIQFENLYAQTAELVSSSKDNVESFKSTLVDCCFRYLNHGHSSKGILTNKHKEALRKLKTNDNLLITKPDKGYGIVLMDKNNYINKMKAFLNDQSKFQKLVVKNDLADKIEKQIIDSLKQIKQQGFISEKVFEMLKSIGTRTPRLYGLPKIHKSGLPLRPVLDMNNSAYHTIAKWLMQILKPLHKEIVKHSVKDSFEFVNNIKNLSLKNKFMISLDVTSLFTNIPLLETVDFICNELTERHTETVIPVTAIKQLILRCTMNVQFRFDNEYYRQLDGVAMGSPLGPILADIFLAKLENGPLKDTISHLTSYCRYIDDTFIVLEKEHEKENILNIFNNIHPSITFTLEEEQNGSISFLDVQLTRRIDGTLKRGLHRKSTVGQYTHFYRAVSIK

SEQ ID NO: 41 - protein, 262 aa, Fusarium oxysporum
RSELIEIMNQCRAFRLTMDLKRYYLTKPNGKYRPIGSPTLGSKVISKALTDIWTTIADKRRGVMQHAFRPKLGVWSAAFAVCQKLRSRKPSDVIIEFDLKGFFNTIKRNSVQEAANRFSLLLGNCVRHIIDNTRYVFEELKPETELHIINDYTHHKYKRAIPIYRTGVPQGLPLSPVAATIALENEVNMPEMVMYADDGILIGGKEKFAEFVKKAIRVGAEVAPEKTREVTKEFKFLGLTFNLEKETVSNGDSYRFWNDKDL

SEQ ID NO: 42 - protein, 265 aa, Strongylocentrotus purpuratus
MDNIHTAKHLISPHCYLASIDLQDAYYSIPVDPNSRKYLRFMWQGERWQFAALTNGLSTAPRLFTKLLKPVFAELRQAGHTVIGYLDDTINIGETKEKLKESVMRQHFENRGLSRRTVDIITASWRASTCKQYQVYITQWRRFCHSRNTSYLQAEVETVLEFLSSLFHDRNLSYRNDNYPSRLQEARVPLLPRSTCTRQNVYGNKLTPQMLCAGYLRGGIDSCDGDSGGPLVCENSNSVWKVVGVTSWGYGCAQPNAPGVYAVVT

SEQ ID NO: 43 - protein, 585 aa, Danio rerio
MSPSRWLIRTIRLGYAIQFAKRPPKFTGVYFSRVNPLSAPVLREEIAALLAKGAIEPVPPAEMESGFYSPYFIVPKKSGGSRPILDLRVLNRCLHKLPFRMLTQRRILQCVRPRDWFAAIDLKDAYFHVSILPRHRQFLRFAFEGRAWQYKVLPFGLSLSPRVFTKLAEGALAPLRLAGIRILSYLDDWLILAHSREQLIMHRDEVLRHLRLLGLQVNREKSKLAPVQRISFLGMELDSITMRLLGHMASAAAVTPLGLLHMRPLQHWLHDRHRVSVTALCRRALSPWNDPSFLQAGVPLGQASSHVVVSTDASNTGWGAVCRGHAAAGLWKGAQLHWHINRLELLAVFLALHRFLPVLERQHVLVRTDSTAAAAYINRMGGMRSRRMSQLARRLLLWSHPRLKSLRAIHVPGTLNRAADALSRQLLRPGEWRLHPESVQLIWARFGEAQIDLFASPENAHCQLFFSLTEGSLGTDALAHSWPRGMRKYAFPPVSLLTQFLCKVREDEEQVLLVAPLWPNRTWISELSLLATALPWRIPLREDLLSQGQGTIWHPRPDLWNLHLPLKKQTVTGSIIAESLKGYML

SEQ ID NO: 44 - protein, 891 aa, Aspergillus terreus
MLPPTGALSQTLQSLTDSKIQEVEKLRGLYESQKTSILHEADQVTNHQERVARILVGIKRYYPNEYHDPEVRNIEQLLDQARYDSSIPPETLQKFESQLRARLETKSRRLGLADLYCRLLTEWMQPPTDPEKGKEVATIEDDFLLVEGKQKQKLKELCDQFESVVFEPRETNADEIRGFLDGLFATEESAKALEELRARIHLQCITFWEEEEPFNPDALAMCIRGLLTEDLLSEEKQDTLKYILENKVALREISDVLNMRYADLGNWDWRAGKDGIPVLPRQQVNGKYRIWMDEDVLQAVFTQYIFIRLCNMVKETLTDFIGDGRVWDWGRSREMTERDKLRWKYYFNLSSPASFGVDAVRKQEFLERHFLYQIPSTQTTLQERGGAYDDDDGDEGSYAAPSEVPKNIKQQLLRKIATETLIQRQVNGRAAVVQSDLQWYATALPHSTIFAVVKYLGFPEKWIRFFEKYLKTPLNLIRSFEDSQSGPRIRHRGVPMSHASEKFLGELVLFFMDVTVNRKTGMLLYRMHDDLWFCGEPEQCVKTWEVLQKYARITGLDFNYSKTGSVYLADIVDEAVVSKLPQGPVKFGFLILDPKSGSWVIDHSQVEAHIQQLKKQLDHCDSIISWIRTWNSCIGRFFRSTFGEPAFCFGRPHVDAILATYAKLQNTLFDDQRQCGALRVTEFLRQRIKSHYGEFDIPDSFFFLPEELGGLGLRNPFVPIMLVRGNIENSPIDLCDKFKKEEIEDYVAAKKAFEDLHERARLRRLDYINREADSRLGQIIKTSEMNHFMSFEEYTRFRESKSTRLRSCYEELMRVPERMSLFSTQIVRDELHRTGRSRLGHLDLETKWLLNLYADELLANFGGFDLVDKKFLPVGVLNMVKGKKVKWQMVL

SEQ ID NO: 45 - protein, 873 aa, Parastagonospora nodorum
MAASSLSTLQHVTLQKLNKLDSQRQQFESDKKSILEQVSSVPDHRSKVEALLDGFELHGIAPKQADLSISNLKHFVHQAKHDPSVSASLLKDWQSRLEHELNVKSNKYEYAALFGKLVTEWIKHSTLVKSADVSDGSIAKGRKKMQEQRQSWENYAFVEKEVNQSTIEQYLSDIFGDALQTEKIKKSPLRVLRDSMKEVMDFKSDLDTSEKDFSSNKRFGHSAPHGSRFTIELLQSCIRGVKKADLFTGRKLEMIIDLEKQPAVLKELVDVLNMDVDGLDHWEWDGPVPLNMRRQTNGKYRVYMDEEIHQAILLHFIGKTWAVALKKAFTNFYHSGAWLQAPYRSMPKKIRQRREHFIENSNKSGDSVRNYRRQKYQQEYFMTQLPSNAFEDAREYDAAEGQEKNSHIATKQTMLRLLTTEILLNTKVYGECSVLQSDFKWFGPSLPHDTIFAVLEFFGVPAKWLRFFKRFLEVPVVFAQDGAGAKARVRKCGIPNSHILSDALGEAVLFCLDFAVNRRTKGANIHRFHDDLWFWGQETTSVQAWEAIKEFTEVMGLQLNEEKTGSSIIVADKSRARVPHPNLPEGNLHWGFLELDASAGRWVIDRAQVDEHITELRRQLDACHSVMAWIQAWNSYVGLFFNTNFAQPANCFGRQHNDMIIETFSHIQRSFFGKYGTANVTEYLRSVLKERFQTTDAVPDAFFYFPVELGGLGLNNPSISAFATYQNSSRDPSARIERAFEEEREAYDTAKQRWDAGDVPCPNRETDEPFMSFEEYTAFREETSHPLFEAYMNLLECPVEERVETSDEMYEALRRSDAPHALGSNHYWLWIFNLYAGDLKQRFGGQGVQLGERDLLPVGLVEVLKSEKVRWEN

SEQ ID NO: 46 - protein, 1062 aa, Gallus gallus
MALVDTGAETSIIYGDPNQFSGSKAMIGGFGGQMIPVTQTWLKLGVGRLPPREYKVSIAPIPEYILGIDILSGLTLQTTVGEFRLRERCISIRAVQAIIRGHAEIEPICLPQPRRITNTKQYRLPGGQQEITKTVQELERVGIIRPAHSPYNSPIWPVRKPDGTWRMTVDYRELNKVTPPIHAAVPNIASLMDTLSREIETYHCVLDLANAFFSIPIAKESQDQFAFTWEGRQWTFQVLPQGYVHSPTFCHNLVASDLANWNKPSTVKMFHYIDDLMLTSDSIEALEKTVPSLITYLQEKGWAINPQKVQGPGLSVKFLGVVWSGKTKVLPSAIIDKIQAFPVPTKPKQLQEFLGILGYWRSFIPHLAQLLKPLYRLTKKGQVWDWGRTEQEAFQQAKIAVKQAQALGIFDPTLPAELDVHVTQEGFGWGLWQRQGSVRIPIGFWSQIWHGAEERYSMVEKQLLATYSALQAVEPITQTAEVIVKTTLPIQGWVKDLTHIPKTGVAQSQTVARWVAYLSQRSRLSSSPLKEELQKILGPVTYHNGSSRGNPSRWRAVAYHPSTETIWFEEGDGQSSQWAELRAVWMVITQEPGNSALNICTDSWAVYRGLTLWIAQWATQDWTIHARPIWGKDMWVDIWNVVRHRTVRAYHVSGHQPLQSPGNDEADTLARVRWLGNTPSEDIAHWLHRKLRHAGQKTMWAAAKAWGLPIQLPDIVQACQDCDACSRMRPRPLPETTAHLARGHNPLQRWQIDYIGPLPRSEGARYALTCVDTASGLMQAYPVAKANQANTIKALTRLMASYGTPEVIESDQGTHFTGATVQKWAEDNNIEWRFHLPYNPTGAGLIERYNGILKAALKADSQSLQGWTKRLYETLRDLNERPRDGRPSALKMLQTTWASPLRIQITSKDTSLKPQVGTMNNLLLPAPDDLEPGRHKVKWPWKVQAGPKWCGLLAPWGRLLEVGGSVNPSVIGVWPTEVIVDTPVFIARGTLIMSMWQIRTPPLVPDIVIQSQISGQRVWYRRPGRAPIQAEVLTQDRNTACILPWRADLPLLVPIKHLFYSP

SEQ ID NO: 47 - protein, 450 aa, Bos taurus
MVKSLCQPRKHQGGHQVIHEFLCIPECPLPLPGRDLLSKLGVQVTFSPEERPTFRVGTPTNLLSLSVTPQDKWRLREPPGDKQGQATEVERRLTQLFPEVWGEDNPPGLARHQAPMIIELKACATLVRKCQYPIPRGARIGILPHISRLKQAGILVECQTAWNTPILPVKKEGGQDYRPVQDLRLVSQATVTLHLSVPKPYTLLSLLPPKTRIYTCLDLTEAFSRICLAPASQPIFAFEWDDPIGGNKQQLTWTHLSQGFKNTPNIFGEALASDLEPFQPERYGCCLLQYVDDGLLAAETWVECCEGTPVLLHLRAEAGSRVSRKKAQICKEEIRYLGFVLRGGTRLLDQSRKEVILRPHTPKTHRQVREVLGATGFCRIWIPRYSQIAQPLFELLTGPEENPINWTEKQQKAFEELRLAFTSACALVLPDLPKPFTLYVTGKDEQPWGF

SEQ ID NO: 48 - protein, 879 aa, Danio rerio
MPEIANDGSQSHITFFLCASLLFPMEARSYWGDSPCCSPQLDDIVDHDGLQTKRSSSSPQGAPKKRTAFVDITNAHKIELCNPIKKKDPAKKVQKTSVLLKNDVNLKSIVSPEEKLEELKNVESDIEETSCKDPIPPHLLPPEIPPEFDIDSEHLSDSSHTSEYAKEIFDYLKNREEKFVLCDYMVDQPNLNTNMRAILVDWLVEVQENFELNHETLYLAVKVTDHYLAVSQTKREALQLIGSTAMLIASKFERVEDICLNWRNGHLTNILLCAQHAEDKLTVKQEQDKKKAERELCMALVQVANQRSNQHLTTKFKGDKGVKGEKDTRWRNWYVTYGDETCRACRARDVNRYQMSALATEMDFWLRIDPKGANQQRGADVRRGKSRMERVWANSQQLQDIMSPGELHCTSHVVTDRDAEFEKAWFEANVNETLILEKMYWKDSLCAVSVSLSEKQRSFYLMSAQAVPHISVCKGKHQSWADLGPFEKQCLEVKDCISREGGVEWSALSQAFRVDSETETAVSRTVTAIDKHCVKNSCMVDFNAADIHPALAEILSELWAKSKYDVGFIKGCDPVTIIAKSDYRPCQQQYPLKREAIEGITPVFEALLEQGVIVPYNNSKVRTPIFPVKKIRDNGMPTEWRFVQDLQAVNAAVKQRAPLVPNPYTILSQIPEKSQFYSVVDLANAFFSVPVDKDSQFWFAFNFNGKGYTFTRLCQGFTASPTLYNEALLRSLEPLTLTAGTALLQYVDDLLICAENEETCVKDTVTVLRHLAKEGHKDMQTFATGLEKNKWRQSGCVMKDNVKAAQGKAAERPLHSLRPGDFVVIRDLRRKSWRAKLWLGPFQVLLTTETAVKVAERATWVHAGHCWKVPSPEKDSTRE

SEQ ID NO: 49 - protein, 366 aa, Bos taurus
MVHGTLLVLQGPFVSAGGHLVIHEFLYLLGSPIPLPGRDLLTKLGAQITFAPGKSASLTLGRQSALMMAMTISREDEWCLYSSGREQINPPRLLKEFPDVWEEKWPPGLAKNSVPIVVDLRPGATPVRQKQYPVSQEACLGIWDHIQHPQNAEILIECPSPWNTPILLVKRSGGNDYRAIQDLRTINCSDHHPSSGPKFLHSLESLTHSGKLVHLPRSHGLILLPPAVTSQPLFAFEWEDPHTGRKTQLTWTQLPQGFKNSPILFGEALAANLAAFPSETFNCTLLLYVDNLLLASSTQGDCWRGTKALLALLSTTGYKVSWKKAQICRQEVKYLGFVITKRHWVLRHERKRAICSIPWRDTKKEV

SEQ ID NO: 50 - protein, 936 aa, Gallus gallus
MVVGTLPLNLLGLDMLKGKSWTDDKGREWMFGVPSLNIRLLQTAPPLPPSNLTCVKPYPLPLGARSGISPVLAELKEQGIVIPTHSPFNSPVWPVRKPNGKWRLTIDYRRLNANTGPLTAAVPNISELIAAIQEQAHPFMATIDVKDMFFMVPLHPDDQLRFAFTWEGQQYTFTRLPQGFKHSPTLAHYALAKELEQIPLEEGVRLYQYIDDILIGGDHLTPVKIMHDKIIKRLEELGLTIPPDKIQSPAAEVKFLGIWWKGGMACIPQDTLSALDQLKMPENKKELQHALGLLVFWRKHIPDFSIIARPLYDLLRKGVSWGWTPVHEEALQLLIFEAITHQSLGPIHPSDPVQIEWGFAHSGLSIHLWQKGPEGPIRPIGFYSRSFKDAEKRYSQLEKGLFVVSLALREAERTIRQQPIILRGPFKVIKSVMSGTSPPDGVAQRASVRKWYAQIEHYCNIFKVTEGAPKTLAIQDDILSTTDTDLPSVVQVAPPYSDQLQNVWFTDASSKREGKVWKYRAVALQIGTDLTIITEGEGSAQVGELVAVWSVFQHESESTTRVHIYTDSYAVFKGCTEWLPFWEKNNWEVNRIPVWQKEKWQDIISIAKKGQFSVAWVAAHQEDGTPVSHWNNRADELARIAPLRQGEPDSDNWERLVEWLHVKRGHTGALDLYRETQARGWPVTREQCRTCISACDLCRTRLGQHPLQDAPLHLREGKHLWETWQIDYIGPFRKSEGKQYVLVGVEIISGLLQAESCPRATGENTVKALKKWFSILPKPTSIQSDNGSHFTSGVVQEWAREEGIHWIFHTPYYPQANGIVERSNGLLKKFLKPEKTNWSTRTSDAVRRVNDRWGINGCPRFNAFYPKAPPLLPITLNPDKLEEPSYSPGQPVLVDLPHVGPVPLTLMESLNKYTWRAKDAREKEYKINARWIIPSF

SEQ ID NO: 51 - protein, 395 aa, Homo sapiens [sequence omitted]

SEQ ID NO: 52 - protein, 1132 aa, Homo sapiens
MPRAPRCRAVRSLLRSHYREVLPLATFVRRLGPQGWRLVQRGDPAAFRALVAQCLVCVPWDARPPPAAPSFRQVSCLKELVARVLQRLCERGAKNVLAFGFALLDGARGGPPEAFTTSVRSYLPNTVTDALRGSGAWGLLLRRVGDDVLVHLLARCALFVLVAPSCAYQVCGPPLYQLGAATQARPPPHASGPRRRLGCERAWNHSVREAGVPLGLPAPGARRRGGSASRSLPLPKRPRRGAAPEPERTPVGQGSWAHPGRTRGPSDRGFCVVSPARPAEEATSLEGALSGTRHSHPSVGRQHHAGPPSTSRPPRPWDTPCPPVYAETKHFLYSSGDKEQLRPSFLLSSLRPSLTGARRLVETIFLGSRPWMPGTPRRLPRLPQRYWQMRPLFLELLGNHAQCPYGVLLKTHCPLRAAVTPAAGVCAREKPQGSVAAPEEEDTDPRRLVQLLRQHSSPWQVYGFVRACLRRLVPPGLWGSRHNERRFLRNTKKFISLGKHAKLSLQELTWKMSVRDCAWLRRSPGVGCVPAAEHRLREEILAKFLHWLMSVYVVELLRSFFYVTETTFQKNRLFFYRKSVWSKLQSIGIRQHLKRVQLRELSEAEVRQHREARPALLTSRLRFIPKPDGLRPIVNMDYVVGARTFRREKRAERLTSRVKALFSVLNYERARRPGLLGASVLGLDDIHRAWRTFVLRVRAQDPPPELYFVKVDVTGAYDTIPQDRLTEVIASIIKPQNTYCVRRYAVVQKAAHGHVRKAFKSHVSTLTDLQPYMRQFVAHLQETSPLRDAVVIEQSSSLNEASSGLFDVFLRFMCHHAVRIRGKSYVQCQGIPQGSILSTLLCSLCYGDMENKLFAGIRRDGLLLRLVDDFLLVTPHLTHAKTFLRTLVRGVPEYGCVVNLRKTVVNFPVEDEALGGTAFVQMPAHGLFPWCGLLLDTRTLEVQSDYSSYARTSIRASLTFNRGFKAGRNMRRKLFGVLRLKCHSLFLDLQVNSLQTVCTNIYKILLLQAYRFHACVLQLPFHQQVWKNPTFFLRVISDTASLCYSILKAKNAGMSLGAKGAAGPLPSEAVQWLCHQAFLLKLTRHRVTYVPLLGSLRTAQTQLSRKLPGTTLTALEAAANPALPSDFKTILD

SEQ ID NO: 53 - protein, 1117 aa, Tetrahymena thermophila
MQKINNINNNKQMLTRKEDLLTVLKQISALKYVSNLYEFLLATEKIVQTSELDTQFQEFLTTTIIASEQNLVENYKQKYNQPNFSQLTIKQVIDDSIILLGNKQNYVQQIGTTTIGFYVEYENINLSRQTLYSSNFRNLLNIFGEEDFKYFLIDFLVFTKVEQNGYLQVAGVCLNQYFSVQVKQKKWYKNNFNMNGKATSNNNQNNANLSNEKKQENQYIYPEIQRSQIFYCNHMGREPGVFKSSFFNYSEIKKGFQFKVIQEKLQGRQFINSDKIKPDHPQTIIKKTLLKEYQSKNFSCQEERDLFLEFTEKIVQNFHNINFNYLLKKFCKLPENYQSLKSQVKQIVQSENKANQQSCENLFNSLYDTEISYKQITNFLRQIIQNCVPNQLLGKKNFKVFLEKLYEFVQMKRFENQKVLDYICFMDVFDVEWFVDLKNQKFTQKRKYISDKRKILGDLIVFIINKIVIPVLRYNFYITEKHKEGSQIFYYRKPIWKLVSKLTIVKLEEENLEKVEEKLIPEDSFQKYPQGKLRIIPKKGSFRPIMTFLRKDKQKNIKLNLNQILMDSQLVFRNLKDMLGQKIGYSVFDNKQISEKFAQFIEKWKNKGRPQLYYVTLDIKKCYDSIDQMKLLNFFNQSDLIQDTYFINKYLLFQRNKRPLLQIQQTNNLNSAMEIEEEKINKKPFKMDNINFPYYFNLKERQIAYSLYDDDDQILQKGFKEIQSDDRPFIVINQDKPRCITKDIIHNHLKHISQYNVISFNKVKFRQKRGIPQGLNISGVLCSFYFGKLEEEYTQFLKNAEQVNGSINLLMRLTDDYLFISDSQQNALNLIVQLQNCANNNGFMFNDQKITTNFQFPQEDYNLEHFKISVQNECQWIGKSIDMNTLEIKSIQKQTQQEINQTINVAISIKNLKSQLKNKLRSLFLNQLIDYFNPNINSFEGLCRQLYHHSKATVMKFYPFMTKLFQIDLKKSKQYSVQYGKENTNENFLKDILYYTVEDVCKILCYLQFEDEINSNIKEIFKNLYSWIMWDIIVSYLKKKKQFKGYLNKLLQKIRKSRFFYLKEGCKSLQLILSQQKYQLNKKELEAIEFIDLNNLIQDIKTLIPKISAKSNQQNTN

SEQ ID NO: 54 - protein, 1447 aa, Leishmania amazonensis
MSASFPSIPGFAGPLSLKAFLEEYFGLHLTFAAETASPSPRAAATAETPSAAGFRALRDVVLPPNQSFLVVVYVALHASSSPPPTTAHASPTPATPDPGCAAPPTGLGRLRQPLAHQTAVSTAHDTCVTRCNPSDRQNPFCLSSSSTGKNGNARSPWCASASWLLYTNTSHRPFTDALLRHPWRASFSACLGPAAMGFIEMYCPIVLQLEAMAGGVQVIGPALKHVALETSFSATAQLSEMKGLPPRGSASVSSRGVKRAVDTGECSAPLPLQKQRRVEAVASPPKAGRRLQREVAPSHRPCRDDSFSSPVNRAAMPATWAAALTRTDDPRTRLYSVRVSDSDCTGDGGGALPLPAGSLEAHWLPRHPRSLHRVLQAALPKRAAYGASTRHYCAGTGERGTGCTSVKNISMWHVAHVFRWLVLQPSQSGEVAFQTTSPKFDLPSYLRRFLSTDVDQCSRLDLRGAALRHTGYLEEAFRRQQQGVEPWDVQRLSTPVDVVVSYLRTLLPTLRWAPLKEANNGLFWGRDAAGSERVLDALMRAVRGWLIAGRQAVVPVSRFLDGVPVAQVPWLNGFYTTTPSLPFSDATSSASRHARRERSQVQQRVWLQFVLFLTQDILPFLLRASFTITWSSKNTHKLLFFPAFVWRRLVRREVRRTRSCHAPRSQMSLAEERTRMSGADHAALVSAPNACGGAVAAAFPSPHSAASNASAAISAPRDEWRAVRTGGALAHWSARATLATRGGGASCLYAGVRFRPDRRKLRPIAVVRSASLRSLKEMARGSPSPYSHASAIVRLLRRLGCSDADGQLPAATATLLRQVQARSRHNRRTGVHRSAHPLPPHLPHKAALQDALRCLVSGVEEQRVRDGLPRLSNLSHQDEYAELRSFCEEVRGRHAIPCEGPAKTTPAVSSASPPGATACFAPYVTLLRSDASRCYDNLPQGRVLAAVRSLVKHDAYRVLRFTVIHAVDSEATCKGGCLLRRTFTTRTIPCAEAECGFLARIPRGHIYWEEEGRTPTGPHTSAAVSRTTDASSRCGANLISGAAVRALLSEHIRHHLVVVSGGSLFEQRVGILQGSPVAMLLCDRLFSNVVDTALSSILSEHAERSLLLRRVDDVLVATTSPAAAERCLRAMQRGWPSVGYLSNPSKLTLSKACGSLVPWCGLLLHDTTLEVSVEWRRIGVLLGSLRVGDPHYVHRGDYEPLYLTQRFLAVLQLRVAPTALCGRMNSKTRQLQTFYEVGLLWTRVVLEKVQEALPVARNCCVTVLLLRPLAVCVGRLCRLLSRHQRFLAARQSACDVSAAEVRACVLTALHRTVQAKLRVLQARTVRAMTAQSGRTQRGPSLKGRRNNFCSTKASSVGRKGCEQRRRGRNRRNTRVCLRSFWWLTAAEVESQWRRSLGALYRAAPRPGEACGSTASSPSPAASASLLMEDGPLSMHARALSATRLSQT

SEQ ID NO: 55 - protein, 1202 aa, Aspergillus nidulans
MGKKRKRPVKEPVKDDPICRAKSSPQQPAGNTARSLSTNRNQAADAGKICHPVISLYYRHVVTLRQYILQRIPRSSRARRRRIAAVGGHSAARDGLAAVPKNEKDLADLLDTTLVGILKELPPTRSEERRRDFIAFTQAQQTTQTGTDSGPIVDFAISSIFNRPSHGKLENVLSHGYRQGGGRLPCSIPNVAAQFPNKNVQMLKQSPWTEVLALLGSNGDEIMLKLLLDCGLFMAVDARKGVYCQISGQAISSLKPIDTSPEDCPAAFNGSSSPVKRHAVPWQGAAPRAHTKGPKENQQQLSPNAIIFCRQRMLYARPHLNANGGITFGLPNHVLSRFHSAKSLQQTVHVMKYVFPRQFGLHNVFTSHSSYYENPLSKNYSSREEEIARKEGLEAARNQLRKSGFHAAIGERQESIKIPKRLRGKPLELIRQLQNRSRRCCYKKLLQYYCSEELSGPWILGQLSAESNSVLSTSSSRPLVTQPSLAHQDMQRELRPTSYAKGFSKGSGATKPKENLTDHATPAASVSAFCRAVIRNLIPLEFFGVGEQGITHQKMILGHVDRFIRMRRFESLSLHEVCEGIKPESLRQAPSENNISASDLQKRRELFHEFLYYLFDSILLPLIRGSFYVTESQVHRYRLFYFRHDVWRRLTAQPLAHLRASIFEELAPETAEKLLSGKKSIGYGSLRLLPKTTGIRPILNLRRRTLVRSIYAGKNRYHPAQSVNSAIAPVYSMLNYERGRRNDLLGSSMFSVGDMHSRLKKFKESLMSRGWDQRKRLYFVKLDIQSCFDTIPQAKIVRLVEKLVSEENYHWMKYVEMRLASEFDNMWPLRKPQQRRTWSKYLQRVGPVGRPENLADAIANGSVVGRRNTVLVDTIAQKEYNGEGLLDILNEHIRNNLVKIGKKYFRQRKGIPQGSVLSSLLCSLLYAEMERDVLGFLQTDDALLLRLLDDFLLVTLDSGLAMDFLRVMVRGQPDYGISVNPAKSLVNFAAVVDGAQIPRLVDTPLFPYCGSLIDTRTLEIFRDQDRMLEGADSASVALSDSLSIDSTRTPGRSFYRKVLASIKQSMHPMYLDSTHNSLPAVLLNVYKSFVTAAMKMYRYTRSLPGRARPRPEVVVRTIHDATQLGYRLIRGRHGLCRVTHPQLQYLGGAAFQFVLGRKQTQYAGVLRWLDGTLAEARQSVGNSVLLAQAVQKGNRTYREWRF

SEQ ID NO: 56 - protein, 1158 aa, Bombyx mori
MPITRSTGRGRIETEQSPPSETTATTQSMWTETTANTVMSLVAPTTESSCATANTEATTKLAEKPGNSKTEAVKQYIAKQNDVPTKQRAGTVKSDRSRNRKEQKIAKAREELARLQVELAAARLATLEAGSDDENSESEYSKSELDERVGTWLETQPTKTENHDRHKETPAGACDKQDFSDLTAAITLAVKAAREPRYTELPFFNGNHQDWLSFRAAYHETMNSFTKTENINRLRRNLKGRAKEAVDGLLITNADPSDVIRSLEARFGRPETIAITELDTLRALPRLTETPRDICIFSSKVTNAVATLRALNCTHYLYNPETTKTMLEKLTPTLRYRYYDFTAVQPKEDPDLIKFEKFMKREAELCSPYAQPEQAGHYSQPAQHNRRTQNVHIVSEKPSRAKCPVCSNTEHTTTDCYIFKKADSNTRWDIAKNKHLCFRCLQYKNKTHNCKPKTCGINDCKYTHNKMLHFDRKIEKTDNSDKETTENINSAWTGKQKQSYLKIIPVQVQGPIGTVDTYALLDDGSTVTLIDEIICKKTGTTGPIDPLHIQAINNIKSTETRSRRVNLTLRGLNSRKEIIQARTVNDLQVTAQKIPKEQIDEYSHLQDISDIITYENAKPGILIGQDNWHMLLASKVRRGNRNQPIASLTPLGWVLHGGRTRTLSHHINYINHASETQEDDKIENLVKQYFAMDALCITPRRPKTDPEEQALRILNSNTVHTTDGRYETALLWKTDNVSLPDNYNNSLKRLINIENKLDHNPELKQKYTEQMEALVAKGYAEPAPKTKTENRTWYLPHFAVVNPPKPEKLRVVHDAAARTRGVALNDMLLKGPNLLQSLPGVIMRFRQHNITATADIKEMFIQVKLRPEDKDALRYLWRKDQRDNKPPEENRMTSLIFGASSSPSTAIYVKNLNAQKHEATHPEAAATIQNRHYVDDYLDIFKGLKDAVLVTTDFRRKHERKPTSKTFWIDSEIVLRWTRTESRSYKPYVAQRLTAIEDSSTINERRWLPTKHNVADDVTRHVPMSYQNEHRWFRWTEFLRQRQNSWPTESASETTEPMGEVNIAAAVPAGASWPRRRHEKWKCQPRNTRMRGKSDSDISRSRQRGAHRRHQNQGWSSTETSTKTTDPAHRRRPSCTEKNATDSHGGSNVQDEIGFFIV

SEQ ID NO: 57 - protein, 1726 aa, Anopheles gambiae
MPAADKRVKMFNLKRVEIMNTLQDFEEFTKSFDATIDAYQIPSRLEQLEELVSEFTELRKAFNETVDDSEAFDIMQKDRREFNKRSHEVRAFLLKNSSHSGASSGLNTTQVNTTISAGTQNHLRLPKVDLPSFDGEITKWLTFKDRFSSMVHDSTEMPEVLKLQYLLSALKGDAAHQFEHMQITADNYYVTWEALLKRYDNSKVLKREYFKAFYSLEKMKTDSTEELARIVNEANRLVRGLERLNEPVDKWDTPLTSLLFYKLDSKTLVAWEQYSVDFKTDEFTNLVEFLEQRVNILKSSAQNICNQYSANSIMVTGRQARRDGRNVALPVQQTNNTFKGYLKCPLCNEQHPLHVCERFERASVINREEIVRKHGLCFNCLRKGHSARECRSTYVCQQCKRKHHSKLCKIGRLSEVEVVPSTSRLTATAQANCSKKTVILSTAQIIILDVNDQPYKVRALLDNGSQLNFITERVAQELRLKRARVSEQIAGVGGAIMRVAGSVVGTIRSLTTEYTTCLEFLILPKIATDLPSETMDVRGWKLPKDVRLADPTFHERGSIDMLIGADTFVEMIKAKKIKLDHELPTLLETELGWIVSGAYKHNNLNQSMACTIVSQGGENDIASLMNTFFNIEEVQDQNLWNVEERECEDHFQATTRRDENGRYVVRLPLKAERELGESKEVALRRLIGLERRFEREPKVKEAYEAFMQEYITLGHMSVRENENSSDGYYMPHHAVFKQDSTTTKCRVVFDGSCKTSNGRSLNDILKVGPTIQQDTTDILLRWRRRAIAVVGDVEKMYRQVWVHEEDRKFQRILWRSHSSEKIKTYELNTITYGTASAPFLAIRTLNQVLEDNKEKYPLAASRINDFYVDDFISGADSENEAKQLCEETKAALAMGGFPLRKWASNCPHILPSETEIDNIQRVIELKSREGAVSTLGLVWNPILDTLGVKISEPETCEIYTKRSIIRTIAKIYDPLGIVDTVKAKAKQFMQRVWSLKKENGDSYGWDEEIPQQMRQEWEVFERQLTHLQEVQVPRCVTIVGARNIQIHGFCDASEEGYGACVYVRSTNGEEIVSRLFVSKSKVTPLATKHTIARLELCAAHLLGKLLVKLKRATEDPYETFCWTDSSTVIYWLKSSPSRWKTFVANRVSQIQNATKEFEWRHVPGIHNPADAVSRGRNPAEVVEDKLWWHGPDWLVKDPKHWPKNIESGNTCETAKEEKQTKTTLTCMVKEESFINKLCERVGSFTKLKRIVAYCHRFFDRKRIHRKSYFELRELKRAEKTIIRLVQNEVYATEYECIKQGQQVVRKSPLRVIRPILDKDNVMRVGGRLSNADIKDEQKHPVIIPGKHRIAELIADKYHKILRHAGAQLMINTMQLRFWIVGARNVAKRTVFNCVKCTRCRPKLIQQPMADLPEQRVRQARPFSISGVDYAGPIMVKGTHRRAVPTKGYISIFVCFVTKAVHIELVSNLTSSAFLAALRRFVARRGHVTELHSDNGTNFRGANNKLRELYKLLNSDTHQDEVVGWCAERDMKWKFTPPAAPHFGGLWEAAVKSMKFHLKRVLGTGHLTFEDLSTLLAEIEACLNSRPITAISEDPNDMEALTPGHFLVGNHLQTVADVDIADVPTNRLNHWRLIQKHMQHIWNRWHREYLSTLQKRAKWNKNAISIEPGRLVILQEDNVAVSKWPMARVVDLHPGKDGVTRVVTLKCANGKEIRRPIHRIAPLPIES

SEQ ID NO: 58 - protein, 2330 aa, Caenorhabditis elegans
MTLGSSRSPSPGRRRHASEGGTAVPPTPANCGKPTKKRTRGQVSLATRIVGPLKRRINHKVDAAKRILAETEAKMEILLNMPQDQLVSSEDSTYLDALLIRLQTILVALEGMRDLISDKFRDTEMMVDPNRHQHHQEVLDYLEKSSTARFVDHLTHDIQQLETEMRSRNIPITHFDPSLLATTDVETGATTEDDANDEERRDIEATIEDHAQNNGPSDHRVISDLRTPHGSTPSTGTPRLSSPGMVWDNEGLSLHDELQIANLLDPANPQRSPMAPAAPTSSAAAPTQSAAAPPSSATAPMSSAAAYHLHGQHGQQLGAPAHTNGGTTHRQQPLEQRIQTTTKGVLQGKREQLKQGPTETPLLVQHAPTTTGPGTRITPQRVLNAPALQTHQVINSQVGYPSAGAHEYSAFHPLLQYAPPRGEDTLTHRLLAAIEAIATSQSQMQSELISQGRSVHVLTDRMEATEKLIVEPKILNTTVAEETSRPAMPQPTHETAQQQQTTGSEYEYEFDSDDDNNQQPLPPQPRTEIRYVEVKNNGSHDTQNLLKYLGKYDGNSNIDSFLTDFKESVMENENLNQANKFMILKTHLLGKARDCISRDHVTAKALEKTITSLKSVFGKDENKTSLLAQIHAIGFPQSDVREMRRAIAKHSILVEQLVNSGLAANDERTFTPLTSRLPPAIRTRVTQFWGSKGENATFQEIFDYVTTCVDDMARESILALRHLPTAESETEVGPLGIPYSGQINHANATTQNQGNPNGKKTSISLADKPVYKREDHPKTYYDSNTGESLPGYNAPGKQGPVLRLLPRTFPLYEGTTKKTCKACKGSHHTLRCTLSSKDFRQALNASRLCPICTGYHSVEQCRCLMKCILCQGLHHTGGTLSPTSAIPTINPLLTFLPTFSDSAHFEITSTNIYNGRRIDMILGNDLLAWLNANPETKKHILPSGRLVEITDFGHIVHPVPDKTIYQNHTQIEVTSETFMHASALINGPNPEDPNLALTLQVEQQWKLENIGIEAQPLNDHTTTSAKDLQASFENTLRYTPEGILEVAFPLNGNEVRLKDNYEVAVKRLHATVNALKNSKNPNLLKQYDEIFKTQEASGIIESVTPNMKLETKYNYNMPHRAVIKESSNTTKVRVVYDASSHAVGQLSLNDVVHAGANMVIPLFGILIRSRFIKLMIVGDLEKAFHQVQVQPEFRNLTLFLWLTDLNKPITRDNICTKRFVRLPFGMSCSPNLLASTIVHFLVHNPDELNNDILDNLYVDNILIGTNDLALIMNRITRLKQIFSHMKMNIREFVVNHDESMEKIDPKDRVSARTIKLLGMKWNSSPDADTYTIKIADVQTIMHPTKRDVASKMAETFDPLGLISPIQVSMKRLIQKLWSHEVNWKDPIPKHLLDDWQAIQASFIDRTITVPRRLTTDFEYKDIQLLISSDASQDIYAAAAYVYFSYGDDRPPVISLITSKNKIKPSRETNWTIPKLELLGIEIGSNLASSIVKELRCKVTNIRLFTDSSCALYWILSKKNTRVWVANRIDQIHLNQTRMSECGIDTSIHHCPTKDNPADIATRGMSTSELQNSDLWFNGPEFLKQKPEDWPCKIEGTFTCPAEFQAVVFAEILDPKTKKTKKPLMEKAEKPPASETVLHILELPSKFESIISFRYTNSLRKLMLVTYRTLLAISKMRKGKVPTSWILEKFMMAPNLLEKRRVARHYIFLQHYKECAEQGLTFPSSLRYYVAPDGLYRVLKQAKSPTLPAEANEPILVHPKHPLANLLMLETHEINGHLPEQYTRAALRTRYWLPNDSSVARSVISKCIQCKKVHGLPFPYPHSMTLPESRTTPSTPFQNAGLDYMGPVEYSKDDGVSTGKAYVLIYTCFTTRATILRVVSDGSTERFIMALKTIFHQVGVPKMVYSDNAPAFILGGSILNDDISTWEHHSDPLTSFMATQSIHFFRITPVSPWQGGMYERIVGLVKHQILKVCGADRFDYFTLSYIVSSAQAMVNNRPLMQHSRQPDDMIAIRPCDFLNPGVMIETPPTEFTPSAPSGVPEQRVRAHLASLEETIELLWKYWSLGYIINLRQNHHRNVRCADLKPTVGQVVLVNTNLVKRQNWPLGVIVQVNRSERTDEIRTAVVKCKGKLYKRSVCQLIPLEVQSSDMDSLPDTENREDGQECLMDAGMTVQHPSAPPLTIPSAALFDSPDEHYSPELFPRETCPNVTEATENPSPKIQNNTMIPLVPNTSTIQNARLDLHERVGEVDNFENPDLDQVHVDSKDEVEYQDPSTTEELPTAIPGRSRPILPRRVKKPVYYNYFLHTTTAVTSTFSTPECCEMIPSPNYLVL

SEQ ID NO: 59 - protein, 2037 aa, Caenorhabditis elegans
MEHLGVDPNPLHPIDQYTLLAANKILQRTKRYAEALENLRHYVDDKFQEPVLRGSPLKDVYHEQVQEHLARLQPKSLLTEAKRDITMLERELLNHGFPITTSDPQELVLTPYEYETSEDGTSSSDVDDLASFDGAFDNLRETMGSDHVQIDHQNPNPRVTIPSAILSPPTNGSSHLNYRTVSQPSPLTVHRDSALGSLSRQPSLADELQDERHQHRLSQIRLRALEDTFIARRQADEEAEELGRQQLSQYREMRAARERRLEEMRSQPSPPQAPAPAPRRPHTVHSGAEPTTPDLVPAPALTGYPTPEQLLPQAMLQAMTEMGRLISQLQRDQTQARREQTSFMNECREHLRPPAEGSIGQSAYSPDDEGEEQSQRGSSPPVQPIPDSRSPSGVINFETNAKNLPKFDGTGNFRAFRNGFDTVVLDDPRLPSVTKCNLLRNHLVGNAQQCISHDDDPLVAYQTTMDMLESVYGKGDTQRGLLERFRKLKFHQSNPEQMKLDLTSHQLLVQRLVSTGLSATDDRITMGLIGKLPISFRDKVTEFYTDMDDHPSAIAFYQRIRKHINSFENGLIAASLQPLHVAPVNEIPSHYVKGSVHVVDQKQQPKKGELRHPTSSSGGQKERDTSAFYIDPATGAQLGGHLRPGKRGVHLTLIARTFPLPDETSKKPCAACGGSHSPTRCHLTSQAFREATAQKGLCANCCGKHAIEQCKSHFTAPAFSDQDAHHLDSLEIDHLSISSQRTFDGKRIDMILGNDVLTCLHGDRHTRRHQLPSRRVVDDTRIGYIVHSVPSLILYTSDERKWVFNDQNGLTHSLMLANMVLDHQYVEDPELKLHWSIEQLWKFENLGIEPIPLVDETKKSTQDLLAEFQQNACYTNGVLEVALPFNGNEEKLKNNYAIAYKRLCSLHETLTKGKNLITKYDRVIKDQLLAGIIELVTPEMKPDSPIEYFMPHRAVIKESSNTTKLRVVLDASSPIGKDLSLNDCLHAGTNLLTPLYGILLRSRCYRYIIVADIEKAFHQVRLQVKHRSVTQFLWLADPSQPANADNVVRYRFTRIPFGVASSPFLLGAAIHHFLGRNPHRLNNEIRDNLYVDNCMLGTDDFTKVMPTAMAAKSIFRKMNMNLREFVTNCDGIMQHIRAEDRAESRDIKLLGCMWNSNETVDTYSIKIAVLDIDHPTKREVASKLAETFDPLGLVTPILVQFKRLIQQLWIAGVSWKDRIPIELLPLWRNLQKSFVDKSIHVERRLTFVNEEVIDCQLIIFTDASQDIYAAAAYAHFTYKKWPPVTRLITSKSKIKEVSAANYTIPKLELLGILCGSNLAVTLSKELRLPISSIKLFTDSSCALYWILSAKNTRAWVHNRVQKYHENCARMSECGLSTSLHHVPTKENPADLATRGMSTTELQKSLFWFRGPRFLANPPESWPQKIEGTITCPAEFQDLVYKEIIDTSTEKKKSKPLIEKAIPAAPKATESVLHLTTGPFKSFIPTLNSVCKMFPGKSWDSEIMVEFKNSESALHRRKLVRKLIILHHYRESEALGLKLPADLDYYVDSHGFYLVKKQVTSHALPQEANEPVILFKDHPLATLVMRETHVINGHSSELYTVSAAKTMFWIPHIKVLAKSVVSNCVDCKKVHGLPFRYPNSKTLPEKRTSPSKPFATAGLDYMGPIEYLKDDGVTIGKSYVLVYTCLVTRGAMLRVLPDATTETYLMGLRSIFHCVGSPTDIYSDNAAIFKLGASMLNDDILSGDELSDSLTSYLASQQINFFYITPLSPWQGGVYERIVGLLKHQLYKVSSVEKLSMFSLQYLVSGAQAMINSRPLTPHARSPNDMIALRPIDFQLPGVMLDIPFVHPTGNGRGAEERARAHLAQLETALNRLWQIWTLGYLFHLRKAKHRNKKCTSIKPAVGQVVLIDTNHVNRHKWPLGVILQVHESKRDHEVRTATVKAHGKRCLRSVCQLIPLEVQASEDFTSADPPSEGDLVELEEHDCDDPTSDIPTQAYFEHSRSTARTLLRVSPRVSEIRCLSLGRVTDSPLLVPSVNNN

SEQ ID NO: 60 - protein, 1607 aa, Drosophila melanogaster
MFIGSIASNSSLTDCQRFHYLKSYLAGDALALVKHIPVTNDNYREAWERLEQRYNKQSLIIRSFLNSFMSLPSAINSNIGTVRKIADGADEVIRGLRALNCEERDPWLIFILLSKLDSDTRQAWAQCAESEEKGVTINRFLKFLTSRCDTLEAFELTRSTQARRAATTHHADTHPRREEPKCTSCQQNHQLFKCPQFIALDIASRRDFLKSRKLCFNCLSPAHMVGNCTSRHTCRICRRKHHTLVHGSSQPIQNGNNIDTASVDSRDRPAVSHAGSTIGHNQPLAREGHRLGSETPAENNFTHHTLENIPAAGSQTLLPTILADVIDAWGNTTTCRLLLDTGSTITLASESFVQRIGVRRTHARISILGLAANSAGVTRGRAHIKLRSRHSGQTVELVSFILTSLTSSLPAQVIDTSSSTWRQICELPLADPTFCTPGAIDVIVGSDQLWSLYTGDRKHFGNDFPIALNTVFGWILAGSYSAFDDHPTSAVTHHADLDTMVRSFMEMDSIQPNQALLDASDPTERHFAATHKRSTDGVYVVEYPFKEKAPPIDSTLPQAINRFFSLERKFRRYPELKQQYEAFLDDYLQRGHMEKLTSAQVEESPDTCFYLPHHAVIKLDSLTTKCRVVFDGSGKDSSGVSLNDRLHIGPPIQRDLFGVCLRFRQHQYVLCADVEKMFRGIKVFKPHTNFQRIVWRTTENEPLLHFRLLTVTYGLAPSPFLAVRVLKQLADDHGHEYPAAAHALLHDAYVDDIPTGANTFEELMILKDELIALLDKGKFKLRKWSSNSWRLLKSLPEEDRCFEPIQLLNKSAADSPVKVLGIQWNPGKDVLYLNLKGCDATISPTKRELLSQLSRIYDPLGLVAPVTVLLKLIFQESWTSVLQWDDPIPESLRTRWRALVEDLPALTQCQVPRYIASPFRDVQLHGFADASSHAYGAVVYARVAVGCSFQVTLVAAKTRVAPIKPVSIPRLELNAALLLSRLLSIVKTSLTIPLFSTSCWTDSEIVLHWLSAPPRRWNTYVCNRTSEILSDFPRSCWNHVRTEDNPADCASRGLHPSKLLEHRLWWKGPSWLATPTSEWPPSTSKFSVSSSFDVNTEERAIKPTTLHNFPDESIHELLIHKFSTWTRLIRVSSYCHRFIHTLRSHHRNSAPFLTSEELLDAQRRLIRHVQQKSFAREYEQLENRRQLNAKSHLIRFSPFLDDYGVMRVGGRIEQSTLNYNAKHPILIPKDTPLAGLLVRHFHVSYLHTGVDATFTNLRQQYWILGARNLVRKAVFQCKSCFLQRKGTSNQIMGELPIPRVQASRCFQHTGLDYAGPIAIKESKGRTPRIGKAWFSIFVCLTTKALHIEVVSELTTQAFIAAFQRFIARRAKPTDLYSDNGTTFHGGKKTLDDMRRLAIQQAKDEELAGFFANEGISWHFIPPSAPHFGGMWEAGVRSIKLHMKRILGSKALTFEELSTVLTQIEAILNSRPLCPTGDNSLDPLTPAHFLTGSPYTALPEPCRLDMQVNRLERWNQLQAMVQGFWKRWHMEYLTSLHERTKWHLETENLKIDTLVVLKEPNLPPSKWILGRITAVHAGIDNKVRVVTVKTAHGLYKRPIAKIAVLPLC

SEQ ID NO: 61 - protein, 1240 aa, Arabidopsis thaliana
MVRGAGVRSRGRGRGRVLKGTGESDGHSAKVEQSVGSQPEFVEPGVRNGLGADIAGATGVGAGGAGVGTGVHAVGAEGPGVMGAAAGGAQVPEVGLAGLLRQLLERLPGVVPVETPVAPRVAEVQQRAAVAEEVLSYLRMMEQLQRIDTGYFSGGTSPEEADSWRSRVGRNFGSSRCPAEYRVDLAVHFLEGDAHLWWRSVTARRRQTDMSWADFVAEFKAKYFPQEALDPYAGQGMEDDQAQMRRFLRGLRPDLRVRCRVSQYATKAALVETAAEVEEDFQRQVVGVSPVVQPKKTQQQVTPSKGGKPAQGQKRKWDHPSRAGQGGRARCFSCGSLDHKDAGGQFLAVLGRAKGVDIQIAGESMPADLIISPVELYDVILGMDWLDYYRVHLDWHRGRVFFERPEGRLVYQGVRPISGSLVISAVQAEKMIEKGCEAYLVTISMPESVGQVAVSDIRVVQEFQDVFQSLQGLPPSQSDPFTIELEPGTAPLSKAPYRMAPAEMAELKKQLKDLLGKGFIRPSTSPWGAPVLFVKKKDGSFRLCIDYRELNRVTVKNRYPLPRIDELLDQLRGATCFSKIDLTSGYHQIPIAEADVRKTAFRTRYGHFEFVVMPFGLTNAPAVFMRLMNSVFQEFLDEFVIIFIDDILVYSKSPEEQEVHLRRVMEKLREQKLFAKLSKCSFWQREMGFLGHIVSAEGVSVDPEKIEAIRDWPRPTNATEIRSFLGWAGYYRRFVKGFASMAQPMTKLTGKDVPFVWSQECEEGFVSLKEMLTSTPVLALPEHGQPYMVYTDASRVGLGCVLMQHGKVIAYASRQLMKHEGNYPTHDLEMAAVIFALKIWRSYLYGGKVQVFTDHKSLKYIFTQPELNLRQRRWMELVADYDLEIAYHPGKANVVVDALSRKRVGAALGQSVEVLVSEIGALRLCAVAREPLGLEAVDRADLLTRVRLAQKKDEGLRATKMYRDLKRYYQWVGMKMDVANWVAECDVCQLVKAEHQVLGGMLQSLPIPEWKWDFITMDLVVGLRVSRTKDAIWVIVDRLTKSAHFLAIRKTDGAAVLAKKFVSEIVKLHGVPLNMKEAQDRQRSYADKRRRELEFEVGDRVYLKMAMLRGPNRSISETKLSPRYMGPFKIVERVEPVAYRLELPDVMRAFHKVFHVSMLRKCLHKDDEALAKIPEDLQPNMTLEARPVRVLERRIKELRQKKIPLIKVLWDCDGVTEETWEPEARMKARFKKWFEKQVAA

SEQ ID NO: 62 - protein, 2058 aa, Oryza sativa
MVEVLEEEVEVQTLTPSRSEGASGSRNPRHRRRGSRTPPLSDPLRREAGGALLRHPPVNVEPEAPVQRWLDDVANLVTTAQRRLAVSGRSTATGTSRTSTTLSSSARRRARRIATASRRSTAPTSSGASESRRRHDSLYGEQDARVNIERRRDERRATRMGEGASSSGVPRFSSRGGPPLTSTPGGTGYKAFVASLRNVRWPPKFCLNLTEKYNGSINPSEFLQIYTTIIVAAGGDDRVMANYFPMALKAHAVVYAFWNGVRHNRKLEKIASKEPKTTAELFELADKVAQKEEAWAWNSPSTGAAAAAAPETAPRSKRRDRRGKRKPARSDDEGHVLAADGPSRAPRRERATDGKTSYTAPSGKGRSADKWCSVHNTYRHSLADCRSVKNLAERFRKADEEKRQSRREGKALTTPANDQREESKKKAPADDGDDSEGLEFQDILCKVLRDKCGQKSAAKTCGILEFVRDNSRVRSQKAVFLMAEKPPPSPSSASPGSVKEKIQQLDLSEVNEGNVMTITLDKLTPDQKEFEAMMQQARNQFLNSFMQTRKGTVVQKYQVRVVADVPGTGSSKDGEMKQALGGSAQPSNKGATNGSAQENQGDHSQGVHGVQGDGTQGPRGGSLNQDGSASQEFFNNFQDRVDYAVHNAFINQSGVLVNTLSNMMKSIADGSIAKHQAAGPVYLPGGQLVNPRQLMRENPQHSGQVANRLTQDQVATMFLPLQPTVDLVQQQPIQQTPPIQQVVQPIQQQVVHWADLEKQFHSYFYSGVHEMKLYNLTAIKQRHDEPVHEYIQRFREMRNKFISLSLTDAQIADLAFQGMIAPIREKFSSEDFESLPHLTQKVTLHEQRFAEARRNSRKVNHVCSYMCGSDDEDDDSEIAAAEWVRSKKVMPCQWVKNSGKEERYDFDITKADKIFDLLLWEMQIQLPAGHTIPSAEELGKKRYCKWHNSGSHTTNDGKVFRQQIQSAIEGGKIKFDDSKKPMKVDGNPFPVNMVHTAGQTADGGRARGFQMNSAKIINKYQRKYNKQQEKHYEEGDDGFDPHWGCEFFRFCWNEGMRLPYIEDYPGCEQAVFKKPEGAENRHLKPLYINDYVNGKPMSKMMVDGGAALNLMLYATFRKLGRNAEDLIKTNMVLKDFGGNPSETKGVLNVELTVGGKTIPTTFFVIDGKGSYSLLLGRDWVHANCCIPSTMHQCLIQWQGDKIEIVPADSQLKMENPSYYFEGIVEGSNVYTKDTVDDLDDKQGQGFMSADDLEDIDIGPGDRPRPTFISQNLSSEFRTKLIELLKEFRDCFAWQYYEMPGLSRSIVEHRLPTEPGVRPHQQPPRRCKADMLEPVKAEIKCLYDASFIRRCRYAEWVSSIVPVIKKNGKERVCIDFRDLNKATPKDEYPMPVADQLVDAASGYKILSFMDGNVGYNQIFMAEEDIHKTAFRCPSAIGLFEWVVMTFGLKSAGATYQRAMNYIYHDLISWLVEVYIDDVVVKSKEIEDHIADLRKVFERTRKYGLKMNPTKCAFGVSAGQFLGFLVHERGIEITQRSINVIKMIKPPEDKTELQEMIGKINFVRRFISNLSGRLEPFTPLLRLKADQQSTWGAEQQKALDNIKEYLSSPPVLIPPQKGIPFWLYLSAGDKSIGSVFIQKLEGKERADVVKYMLSAPILKGRIGKWIFSLTEFDLWYESQKAIKGQAIANFIVDHRDDSIGLVEVVLWTLFFDGSVCTHGCGIGLVIISPRGACFEFAYTIKPYATNNQAEYEAVLKGLQLLKEVQADTIEIMGDSLLVISQLAGEYECMNDTLIVYNDKCQELMKEFRLVTLKHFVQEHIIYRFGIPQTVTTDQGSIFVSDEFVQFADSMGIKLLNSSPYYTQANGQAEASNKSLIKLIKRKISDYPRQWHTRLAEALWSYRMACHGSTQVPPYKLVYGHEAVLPWEVRIDSRRTELQNDLTADEYYNLMADEREDLVQSRLRALAKVTKDKERVAWHYNKKVVPKDFSEGELVWKLILSIGTRDSKFSKWSPNWEGPFQIHKVVSKGAYMLQGLDGEVYGRALNGKYLKKYYPSVWVNA

SEQ ID NO: 63 - protein, 2876 aa, Oryza sativa
MLHDDLQRGPSIIKNTPPPFVIQFGSLPPVTFFEYGSKVYMQQAQDVTQFQEAQSKKQRKRASAKAKKERRTLMLEARTLLKESVVAEIKGDIQAAQKLRVKASNRRSITASLRAPDPVATPKLPTPTVQHTEVELLEALEAVSDNLRRHISHTRRANSPHPLRNYRRKYRKVQRLHQLVSSRIAQSSLLEEDWSLDTSVLIKKVFKFPSILEPPYDLFPDEWACEPTKIKEKVRCAIMKEYWKRRDREHLVLPGSTIFVDYNTYTPRQQSTWESCLHLSAVGGSSDYNNNRFAVLRSEAPAPRSEDLRQELRELQDRMAQLGRRLQDHEAPRSSSTQAGGRSRRYQPSYHPQHDRRTLAPRRTLPSTQVMHQRQTALPPRWNRWSRHQDYPTSSRLAQEWRVREAPSSQVPPHVPSSPRREVYTQRRRETNAPNPATRQVAPPLLPTPSIPPRRQHAPTENQRKRERRRNNRYALYRELEDLVLKHTQVRVRPDGEVHQEDERIVFRISPSLERDARYNYLIARLTPKPRRTLDVADKNREQALTQPCPVTILQRGKGPVQATLGISLSTSARQSKENQSTPMEGVEQTPVEQVDKASRQEEAIINPMVDVLPQQESSSVPPARVEQVAGSKNIEDPKESIVMCSALAAHYETKPNAAWVPPPVTHDFTYPSDEEIVPNPRANFSKTFLPQLDQVASRPGANTRMKAIAIKNVEATPSQARKDLEDHVEVEDLDELESTSSSSLEVNLNLPRYNELNPSLPSDGEGYPNNFDSAPAHVTAEGDPRQHARQHAPRGENPSIGNWATMKEVFKKHFVAMKKDFSIVELSQVRQWRDEAIDDYVIRFRNSFVCLAREMHLEDAIEMCVHGMQQHWSLEVSRREPKTFSALSSAVAATKLEFEKSPQIMELYKNASAFDPTKRFNATKPSGSGNKPKVPTEANSTKVFSTAPQGQVPMIGAKNEQVGGRQRSTLQDLLKKQYIFRRELVKDMFNQLMEHRALNLPEPRRPDQVTMTDNPLYCPYHRYIGHAIEDCIAFKEWLQRAVNEKRINLDADAINPDYHAVNMVSVEPFPQKQREGRRATSWAPLAQVEDQIAKIMLTKAPATHVEASHGDNNRAWSIVRWKPQPMSFPPRRPQMKLSPHTHPTSRRWLDPSRRRPPPRFVPFSEGDESFPRRGRELPTLAQFLPKGWEQSSTSTREAKGVNNSIPTPDIAPCNVILTYNDSTSTGSDETFTGREREIFHAELDPEKTKVEEVNISLRGGKTLPDPHKSKVPNVDKPAKKASPPGEAPEAPETKTGSKEKPAVDYKVLAHLKRIPALLSVYDALMMVPDLREALIKALQAPEVYEVDMAKHRLYDNPLFVNEITFADEDNIIKGGDHNRPLYIEGNIGSAHLRRILIDLGSAVNILPVRSLTRAGFTTKDLEPIDVVICGFDNQGKPTLGAITIKIQMSTFSFKVRFFVIEANTSYSALLGRPWIHKYRVVPSTLHQCLKFLDGNGVQQRITSNFSPYTIQESYHADAKYYFPVEENKQQLGRTTPAADIIVEPGTETTPEHVYPIYYTNIAQSKTLYLNTDHLGGNFSRKRETAQKQRRCANYHHLTGKTESKQGSRACTTGSGQEESCRDRGGKSGCSVHAAPSPLHFSFYPAREEACTTMKAEPRMARLLEKAGINLQRNNRLPPPPAVCEDWWAQAEEFIKRRCKEQPKYGLGYINVDEPDDEDEVFEDDIFHCCTISTTTRGDALLQQHPFEVAAVGVEEELDVAGALKQLDDGGQPTIDELVEMNLGTEDDPRPIFVSGMLTEEEREDYRSFLMEFRDCFAWTYKEMPGLDSRVATHKLAIDPQFRPVKQPPRRLRPEFQDQVIAEVDRLINVGFIKEIQYPRWLANIVPVEKKNGQVRVCVDFRDLNRACPKDDFPLPITEMVVDSTTGYGALSGYNQIKMDLLDAFDTAFRTPKGNFYYTVMPFGLKNAGATYQRAMQFVLDDLIHHSVECYVDDMVVKTKDHEHHQEDLRIVFERLRRHQLKMNPLKCAFAVQSGVFLGFVIRHRGIEIEPKKIKAILNMPPPQELKDLRKLQGKLAYIRRFISNLSGRIQPFSKLMKKGTPFVWDEECQNGFDSIKRYLLNPPVLAAPVKGRPLILYIATQPASIGALLAQHNDEGKEVACYYLSRTMVGAEQNYSPIEKLCLALIFALKKLRHYMLAHQIQLIARADPIRYVLSQPVLTGRLGKWALLMMEYDITFVPQKAIKGQALAEFLATHPMPDDSPLIANLPDEEIFTAELQEQWELYFDGASRKDINPDGTPRRRAGAGLVFKTPQGGVIYHSFSLLKEECSNNEAEYEALIFGLLLALSMEVRSLRAHGDSRLIIRQINNIYEVRKPELVPYYTVARRLMDKFEHIEVIHVPRSKNAPADALAKLAAALVFQGDNPAQIVVEERWLLPAVLELIPEEVNIIITNSAEEEDWRQPFLDYFKHGSLPEDPVERRQLQRRLPSYIYKAGVLYKRSYGQEVLLRCVDRSEANRVLQEVHHGVCGGHQSGPKMYHSIRLVGYYWPGIMADCLKTAKTCHGCQIHDNFKHQPPAPLHPTVPSWPFDAWGIDVIGLINPPSSRGHRFILTATDYFSKWAEAVPLREVKSSDVINFLERHIIYRFGVPHRITSDNAKAFKSQKIYRFMEKYKIKWNYSTGYYPQANGMAEAFNKTLGKILKKTVDKHRRDWHDRLYEALWAYRVTVRTPTQATPYSLVYGNEAVLPLEIQLPSLRVAIHDELTKDEQIRLRFQELDAVEEERLGALQNLELYRQNMVRAYDKLVKQRVFRKGELVLVLRRPIVVTHKMKGKFEPKWEGPYVIEQAYDGGAYQLIDHQGSQPMPPINGRFLKKYFV

SEQ ID NO: 64 - protein, 1367 aa, Oryza sativa
MTPVDSMSKDPPAEAENGISTTSEPEKDPNAAKSCPSDKKHEPTRTTSEVTRTWCPIHKTRRHILQTCSVFLDVQAEIRASKERGIQRTSPPRDVYCPIHKAKTHDLSSCKVHLSAMRTSPPKVQQSQIYPRDADKEQGATTISDRFVRVIDIDPHEPSILHLLEDQASSSTSTPCDVYAIDGTSTSRDGDAETADQSVTPTPAQHIRILNAILSESPFDPVLNADLDQWTERLRESVANLSNAFAEAAARAPLEQPPTGGANGEQPEERTPHRQATPPPRGNSDLRDHLNGRREARRTQDNENRTIEKYDGSTDPEEFLQVYSRVLYVAGADDNALANYLPTAMKESAQSWLVHLPPYSISSWADLWQQFVTNFQGTYKRHAIEDDLHTLTNMIPEITDASVIRALKSGVRDHYTTQELATRRITTAHKLFEIVDRCAHTDDALRHKNDKPRTGGEKKPAKDARLSQARKRVAGVGNGRLKRSPRPECYTIHKSDKHPLETCFVFKKALTKQLALEKGKRGAASKMKWSEQKIEFSEADHLKTAVTPGRYPIVVEPTIQNIKVARVLIDDGSSINLLFASTLDAMGIPRKQITFDVAEFDAAYNAIIGRTALTKFIAASHYAYQVLKMPGPKGTITIQGNEKLAVQCDKRSLDMVEHTPNTPATAEPPKKPFDMPGVPREVIKHKLIVRPNAKPVKQKLRRFAPDRKQAIREAIRKWRMCIDFTGLNKACPKDHFPLPRIDQLVDSTAGFQGALNDQLGHNVEAYVDDIVVKKKTSDSLIDDLRETFDNLRRYRLMLNPKKCTFGVPSGKLLGSLVSERGIEVNPEKIVGHREREIAHKTQGSPEANWMHGGTKQEAEDAFIALKHYLSNPHVLVAPQPNEELFLYIAATPYSPTVTAVSSFPLGEVVRNKDVVGRIAKWVLELSQFNVHFVPQIAIKSQVLADFVADWTMPENKSDSQTDSETWTMAFDGALNSQGPGAGSILTSPSGDQFKHEIHLNFRATNNTAEYEGLLAGIRAAAALGVKRLIVKGDSELVANQVHKDYKCSSPELSKYLAEVRKLEKRFDGIEVRDIYCKDNIEPDDLAWRASRREPLEPSTFLDVLTKPSVKEANNEEAEKITRQAKIYCMIGNDLYKKASNGVLLKCLWSDDGKHLLLDIHEGICESHAGGRKLRCEACQFHSKHTKLPAQVLQTIPLTWPFSCWGLDILGPFPRGQGGYKFLFVAIDKFTKWTEVTPTGEIKANNAINFIKGIFCKYGLPHRIITDNCSQFISADFQDYCIKLGVKICFASVSHPQSNGQVERENGIVLQGIETRVYDRLMSYDKKWIEELPSILWAVCTTPTTSNKETSFFLVYGSEAMLPTELRH

SEQ ID NO: 65 - protein, 1227 aa, Oryza sativa
MTEKLPPSPGTGVKPPVNKTEAKNPSAEVDPSNIVPITLDRLTAEQRDELEQMMSNVKNKFMDSFQETRRETIPMRSARVHLKVTKVLQLAQVTKVTFLKMWADLEKQLHSYFYSGIHEMKLSDLTAIKQRHDESVQDYIQRFREMRNRCYSLSLTDSQLADLAFQVLIAPIKEKFSAQDFESLSHLAQKVTLHEQRFAEAKKNFKKINHVYPYMCDSDDEDDDSEVAAAEWVKRKKVIPCQWVKSSGKEERFDFDITKADKIFDILLREKQIQLPAGHIIPSAEELGKRRYCKWHNSGSHSTNDCKVFRQQIQAAIEGGKIKFDDSKKPMKVDGNPFLVNMVHTSERAADGGSNRKFQVNSARIISKYQRKYDRQQGEYHEEDGGFDPHWDCEFFRFCWNEGMRLPSIEDCPGCSNAGNSSRSYSRAEFEAKQADVDDVEEASAKVVLSPEQAIFEKPEGIENRHLKPLYINGFANGKPMSKMMVDGGAAVNLMPYATFRKLGRNPNDLIKTNMVLKDFGGNPSETKGVLNVELTVGSPGDRPRPTFISKNLSSEFRTKLIELLKEYRDCFAWEYYEMPGLSRSVVEHRLPIKPGIRPYQQPPRRCKADMLEVVKAEVKHLYDAGFIHPCRYAEWVSNIVPVIKKNGKVRVYIDDEVVISKEIEDHIADLRKVFERTRKYGLKMNPTKCAFGKLEPFTPLLRLKADQKFTWGAEQQKALDNIKKYLSSPPVLIPPQKGISFRLYLSAGDKSIGSVLIQELERKERAIFYLSRRLLDAETRYSPVEKLCLCLYFSCTKLRHYLLSNECTVICKADVVKYMLSAPILKGRVGKWIFALTEFDLRYESPKTIKGQAIADFIMDHRDDSIGSVDIVPWTLFFDGSVCTHGCGIGLVIISPRGASFEFAYTIKPYVTNNQAEYEAVLKGLQLLKEVEADAIEIMGDSLLVISQLAGEYECKNDTLMVYNEKCRELMSGFRLVTLKHVSREQNVEANDLAQGASGYKPMLKDVEIEVATITADDWRYVVFQYLQNPSQSASRKLCYKALKYTLLDDELYYRTIHGVLLKYLSADQAMVVMGEIPPYKLVYGHEAVLPWEVRIGSRRTYLQDELTTDEYYNLMADEREDLVQSRLRALAKVTKDKERVARHYNKKVVPKSFSEGELVWKLILPIGTRDNKFGKWSPNWEGPFQIHKVVSKGAYMLKGLVGKVYGRALNGKYLKKYYPNVWVNL

SEQ ID NO: 66 - protein, 1535 aa, Oryza sativa
MAAEEGAEPSASVAEDGEAQAPSQPPSAPAPSQPSSAPATSVQVPNTADVAKAATAARALQTKAEILSTNQLVVPQAAPSQPAAPTALAVVQAQISLDPEAQAEADMEAMRQNMTRLQDMLRQMQEQQQAYEVTRWTKATSAPILQYSAGYAPPQVRPQVVTQPSPPLAAQPPVYFAGQHQPSGQATQTVAEGASALQAQLQVFHRQLNQPHYISSTTPSAHPVPTIRQQVPTRGFGTNQAPIQAAMTWLQPIFDPSMAAQQVPPVGAGQPNAMAQLHAQAAISPFATPYPQQGAVNRAGGEKGLPLSGGIKTRPIPPQFKFPPVPRYSGETDPKEFLSIYESAIEAAHGDENTKAKVIHLALDGIARSWYFNLPANSIYSWEQLRDVFVLNFRGTYEEPKTQQHLLGIRQRPGESIREYMRRFSQARCQVQDIIEASVINAASAGLLEGELTRKIANKEPQTLEHLLRIIDGFARGEEDSKRRQAIQAEYDKASVATAQAQAQVQIAEPPPLSVRQSQSAIQGQPPRQGQAPMTWRKFRTDRAGKAVMAVEEVQTLRKEFDALQASNHQQPARKKVRKDLYYTFHGRSSHTTEQCRNIRQRGNAQDPRLQQGTTVEAPREAVQEQTPPVEQRQDVQQRMGLPTQALTPAPTSLRGFGGEAVQVLGQTLLLIAFSSVENRREEQILFDVVNIPYNYNAIFGRATLNKFKAISHHNYLKLKMPGPKGVIVVKGLQPSAASKRDLAIINRAVHNVETEPHERPKHTPKPTPHGKVAKVQIDDFDPTKLVSLRSPRLKLRKMSADRQEAAKAEIHMNPLNIPKTSFVTPFGTFCQLRMPFGLRNAGATFARLVYKVLGKQLGRNVKAYVDDIVVKIHKAFDHANNLQETFDSLRAAGIKLNPEKCVFSVRAGKLLGFLVSERGIEANPEKIDAIQQMKPPSSVHEVQKLAGRIAALSRFLSKAAERGLPFFKTLRGAGKFNWTPECQAAFDKLKQYLQSPPVLISPPLGSELLLYLAASPVAVSAALVQETESGQKPVYFVSEALQGAKTRYIEMEKLAYALVMASRKLKHYFQAHKVIVPSQYPLGEILRGKEVTGRLSKWAAELSPFDLHFVARSAIKSQVLADTTEYEAILLGLRKAKALGVRRLLIRTDSKLVAGHVDQSFEAKEEGMKRYLEAVRSMEKCFTGIMVEHLPRDQNEEADALAKSAACGGPHSPGIFFEVLHTPSVPMDSSEVMVIDQEKLGEDPYDWRTPFVKHLETGWLPVDEAEAKRLQLRATKYKMVSGQLYRSGVLQPLLRCISFAKGEEMAKEIHQGLCGAHQAARTVASKGLDIIGPFPVARNGYKFAIVAVEYFSRWIEAEPLGAITSAAVQKFVWKNIVCRFGVPKEFITDNGKQFDSDKFREMCEGLNLEIRFVSVAHPQSNGAAERANGKILEALKKRLEGAAKGKWPEELLSVLWALRTTPTRPTKFSPFMLLYGDEAMTPAELGANSPRVMFSEGEEGREESLELLEGVRVEALEHMHKYTTSTSATYNKKV

SEQ ID NO: 67 - protein, 1254 aa, Oryza sativa
MKEQFGLRPKDAGNLYRQPYPEWFERVPLPNRFKVPDFSKFSGQDSTSTYEHISQFLAQCGEASAVDALRGMIAPIMEKFSSEDFESLSHLTQKVTLHEQWFAEARRNSRKVNHVCPYLCGSDDEDDDSEIAVAEWVRSKKVVPCQWVKNSGKEERYEFDITKADKIFDLLLREKQIQLLAGHTIPSVEELGKKRYCKWHNSGSHTTNDCKVFRQQIQAAIEGGKIKFDDSKRPMKVDGNPFPVNMVHTTGRIADGVRTRGFQVNSAKIINKYQRKYDKQQEKHYEEDDDGFDPHWGVSLLRIRKKVSKIEKPERFQEVEQEINYRLKRTKPKQEWRVKKQAPVADEAAVDAAKRLAKGKSVVIASVNMVFTLLAEFGVKQADVDEVEEESAKLFLSPEQAVFEKPEGTENRHLKPLYINGYVNGKPMSKMMVDGGAAVNLMPYATFRKLGRNTEDLIKTNMVLKDFSGNPSDIKGVLNVELTLGNKTIPTSFFVIDGKGSYSFLLGRDWIHANCCIPSTMHQCLIQWQADKIEIVPADRSVNDCLSGKFWDGDFLKVFDFDIQPVEDGEPKLLFWGRRVYTKDTIDDLDDKQRQGFMSADDLEEIDIGPGDRPKPTFISKNLSAEFRTKLIELLKEFRDCFAWEYYEMPGLSRSIVEHRLPIKPGVRPHQQPPRRRKADMLEPVKAEIKRLYDAGYNQIFMAEEDIHKTAFRCPGAIGLFEWVVMTFGLKSAGAMYQRAMNYIYHDSIGWLVEVYIDDVVVKSKEIGDHIANLRKFLRFLVHERGIEVTQRSVNAIKKIQPPENKTKLQEMIGKINFVRRFISNLLGRLRHYLLSNECTVICKADVVKYMLSAPILKGRVGKWIFSLTESDLRYESPKAIKGQAVADFIVEHHDDSIGSVEIVLWTFFFDGSVCTHGYGIGLVIISPRGACFEFAYTIKPYATNNQAEYEADLKGLQLLNQLAGEYECKNDTLMIYNEKCQELLKEFRLVTLRHVSREQNTEANDLAQGASGYKPMIKNVEVEVATITADDWRYDVHQYLQDPSQSASRKLRYKALKYTLFDDELYYRMVDGVLLKCLSADQAKVAIGEVHEGICGTHQSAHKMKWLLRRAGYFWPTMLEDCFRYYKGCQYCQKFGAIQRAPVSAMNPIIKPWPFRGWGIDMIGIINPPSSKGHKFMLVATDYFTKWVEAIPLKKADSGDAIQFVQEHIIYRFGIPQTMTTDQGSIFVSDEFVQFADSMGIKLLNSSPYLCTS

SEQ ID NO: 68 - protein, 2302 aa, Medicago truncatula
MDYLEQENRVLREEMTAMQTRMDEMAELIKTMAEAQTQAQAQIQAQAQALAQAQTQAQTLTEAQARSQAPPPPPPVRTQAEASSSWTLCADTPTQSAPQRSTPWFPPFTAGEIFRPITCEAQMPTHQYTAQTPLPAMRVTPATMTYSAPVIHTIPQTEEPIFHSGNAEAYEEVSDLRAKYDELRRDMKALHEKGKFGKTAYDLCLVPSVQVPHKFKIPDFEKYKGSSCPEEHLKMYVRRMPAYAQDDQILIYYFQESLTGPASKWYTNLDKTRVQTFRDLCEAFVEQYSYNVDMTPDRSDLQAMTQGDKETFKEYAQRWRDTAAQVSPRIEEKEMTKLFLKTLNHFYYKKMVGSTPKSFAEMVGMGVQLEEGVREGRLVKNTTPASGTKKTGNHFPRKKEQEVGMVTHGGPQQTYPAYQHIAAITPTSHPFQQTNNHPQIPQYPQMPQYPQIPQYPQFPQNPSPQNTQQQNIQQQNFQQQPYQQYPYQQYPQQYFQQQPYQQRPQQPRPPRMPINPIPVTYAELLPGLLKKNLVQNRTAPPIPEKLPSWYRLDQTCDFHEGGRCHNIETCYAFKSAVQRLINDGKITFTDSAPNVQTNPLPNHGAATVNMIENCQKTRPILNVQHIRTPLVPLHAKLCKVDLFEHDHDLCEICLMNSGGCQKVRNDIQGLLDRGELVVERKSDDVCVITPEGPLEVFYDSRKSTITPLVICLPGPLPYASEKAIPYKYNATMIEEGREVPIPPLSSVDNIVEDSRVLRNGRVVPIVFPKRIDATTNKELRTKDADVAKEVDQPKEAGTSAEFDEILKLIKKSEYKVVDQLMQTPSKISIMSLLLNSEAHKDALMKVLEQAFVDYDVTVGQFGGIVGNITACNNLSFSDEELPAEGRNHNRALHISVNCKTDALSNVLVDTGSSLNVLSKTTYTQLAYQGAPLRRSGVMVKAFDGSRKDVLGEVILPITVGPQVFQVNFQVMDIQASYSCLLGRPWIHEAGAVTSTLHQKLKFVKNGKLVTVNGEEALLVSHLSSFSFIGADDVEGTPFQGFTIEDKNAKRNEASISSLRDAQKVIQAGGSTSWGKLIELPENKHREGLGFFPSTGLSTAKKGTFHSSGFIHAIIEDDPESVPRGFITPGVSSHNWVAVDVPFVAHLSKLEIDEPVEQHNPMISPNFEFPVYKAEEEENEEIPDEISRLLEQERKTIQPYGDELEVINLGTKEDKKEIKVGASLETSVKKQVIELLKEYVDVFAWSYRDMPGLDTDIVVHHLPLKPECPPVKQKLRRTRPDMALKIKEEVQKQIDAGFLVTSNYPQWLANIVPVPKKDGKVRMCVDYRDLNKASPKDDFPLPHIDVLVDSTAKSKVFSFMDGFFGYNQIKMAPEDREKTSFITPWGTFCYKVMPFGLINAGATYQRGMTTLFHDMIHKEIEVYVDDMIVKSITEEDHVKYLQKMFQRLRKYKLRLNPNKCTFGVRSGKLLGFIVSQKGIEVDPDKVKAIREMPAPRTEKEVRGFLGRLNYISRFISHMTATCGPIFKLLRKEQGIVWTEDCQKAFDNIKKYLLEPPILIPPIEGRPLIMYLTVLENSMGCVLGQQDETGRKEHAIYYLSKKFTECESRYSILEKTCCALAWAAKRLRHYMINHTTWLVSKMDPIKYIFEKPALTGRIARWQMLLSEYDIEYRSQKAIKGSILADHLAHQPLEDYRPIKFDFPDEEIMYLKMKDCDEPLFGEGPDPDSVWGLIFDGAVNVYGNGIGAVLLTPKGTHIPFTARLRFDCTNNIAEYEACIMGIEEAIDLRIKNIEIYGDSALVINQIKGKWETLHAGLIPYRDYARRLLTFFNKVELHHIPRDENQMADALATLSSMIKVNHHNDVPLISVKFLDRPAYVFAAEAVFDDKPWFHDIKVFLQTREYPPGASNKDKKTLRRLSSNFFLNGDILYKRNFDTVLLRCVDKYEADLLIHEIHEGSFGIHPNGHTMAKKILRAGYYWMTMESDCYKHTRKCHKCQIYADKIHMPPTTLNLLSSPWPFSMWGIDMIGRIEPKASNGHRFILVAIDYFTKWVEAASYANVTKQVVVKFIKNHIIYRYGIPNRIITDNGTNLNNKMMKELCDDFKIEHHNSSPYRPQMNGAVEAANKNIKRIVQKMVVTYKDWHEMLPFALHGYRTSVRTSTGATPFSLVYGMEAVLPVEVEIPSLRVLMEADLSEAEWVQNRYDQLNLIEEKRMTALCHGQLYQKRMKQAFDKKVRPREFKEGDLVLKKIFSFQPDSRGKWAPNYEGPYVVKRAFSGGAMTLQTMDGEELPRPVNIDAVKKYFV

SEQ ID NO: 69 - protein, 1800 aa, Oryza sativa
MTKQSSSKTEVEPTNVIPITLDDFEGEDCKSMKEYIKEITQEALMRACTRTRQGMIIKPGPRPKLTLDLVSNEEVTQSIQQQVASTIDSSMIIFKNKLDATIEGRFDEFLRTKFGPLMADFMLKDKASTSASQAPIDQTSRRTDGAAQTAGPTGPDGRSDRILPRRLDRDSGRSDRASGRRSDRALDRTFDSPVSTVATNSQVPPHVPNAYNDVARGYPPDTRQGQYNHITPQTQPIRPPNPPPNQHRPDNMEEIISGIIRDKFGIEARNRAKVYQKPYPDYYDNVPFPRGYRVPEFTKFSGEDSRTTWEHRFRDVRNRCYSLNITDRDLAGLTFNGLIAPLRERLDGQQFLDVSQLMQKALAQESRVKDNKKFVRPYEKKPNVNLIDYPEASDSEGEGDHDMYVAEWSWTNKNKPFVCSNLMPTPRKDWQSEVQSAIDEGRLKFTDSSKMKLDHDPFPVNTINFNDKKMLIRPEQAESTKGKGVVIGEPRPKMIVPKKPENRANEEKREGKRITVEARTSEVITIKVGSHDVPIPSGDEVGESSSNKPKAGTSSSQSAGLTRPSGRSDRSHTAGLTGPSGQSDRRPNDGPTDAPGRSDSRHHVGPTGAPGRSDRWSKSGLTGLQHRFDGRFTKGSAGTSSSSSRPNRGHYLPPGTEPKPRRFNELRPPPVWRRKSVEKEEPIVVEKKEKQSVDKDESSLKEDMDINMVCMLPMEFCAVDEAEVAQFSLGPKDAVFEKPDESNRHMKPLYLKGHIDGKPVSRMLVDGGAAVNLMLYSLFKKMGRGVDELKKTNMILNGFNDEPTEAKGIFSVELTVGNKTLPTAFFIVDVQDFDKVEKLGQGFTSADPLKEVDIGNGTKPRPTFVNKNMRADYKVKIIKLLKEYVDCFAWKYHEMPGLSRELVEHRLPIKPGFRPYKQPPRHFNPLLYDRVKEEIDRLLKAGFIRPCRYAEWVSSIVSVEKKGSGKIRVCIDFRDLNKATPKDEYPMPIADMMINDASGHKNAGATYQRAMNLIFHDLLGIILEIYIDDIVVKSDGMEGHIADLRLAFERMRQYGLKMNPLKCAFGVSAGRFLGFMVHERGVEIYPKKIEKIRDFKAPICKKEVQKLLGMVNYLRRFIFNLAGKIDAFVPILHLKKEADFTWGAKQQEAFEELKRYLSTPPVVRAPKAGKPIRLYIASEDKVIGAVLTQEEDGKVYIITYLSRHLLDAETRPILSGRIGKWAYALIKYDLAYEPLKSMRGQIACDFIVDHHVDIAYEEDVCLVEVIPWKIYFDGSSCKEGQGIGVVLFSPNGMCYEASVRLEYYCTNNQAEYNALLFDLQVMEMVGAKYVEAFGDSELVVQQVAEVYKCLDGSLNRYLDSCLDIIANFDNFAIRHIARHDNSRANDLAQQASGYDVKKGLFLLFEEPMLDFKFLCEIGEIGDQGRSDRRCAAGLTGDQVQSDRPHAADLTGDPGRSDRPCMAGLTGSGQGAGGHATINLEAKLIVNSDICAQETEEDWRIPLIRYLKDPTLKVDWKIRRQAFKYTLLDEDLYRQNIDDVLLKCLDEDQSKVAMGEGHRFVLVAMDYFTKWAEVVPLKNMTHTEIIDFILKHIIHRFGIPQTLTMDQAKSSNKTLLKLIKKKIEEHPKRWHEVLSEALWAHRISKHGATKVTPFELVYGQEAILPVEVNLGSLRYIKQDDLSGEDYKTLMGDNLDEVIDKRLKALEEIENEKKRVAKAYNKRVKVKLFQVGDLVWKTILSLGTRFREFDSRYSSKRQRGMCLHPNLASKVKIGKVAKIWKSTGFLRVGRSDRRVLGGQTAG

SEQ ID NO: 70 - protein, 414 aa, Coccidioides immitis
MQHYHDTIQQENQLIPSFFTYIAKLKQDLDSLPDEFFHKRRSKVKDYPQTKKTPVKPLPKISEEEHKQQIDEELCLRCGQPGHKTKFCTNSSNKSQQTDKKNKNQAKTRTAKPMQDPGQTLERQGVNPIKKASRCKQAALLDSGTTVNSISYKLASQLDWDQPETPMEVIEMLNRAEADWYSIYKTQLTITDSMGTIKMKKYYCPSRQRFYKNDILIFSASEKEHEKHVRLVMEYLREYQLFAKLAKCAFKRQTISYLGYIIDNEGIKMDPKQIQVITEWLLLQSFHNIQIFLGFANFYQRFIQKYSVIVALLTDLLKSSEKRRKKEPFLLTPTTRKVFCELQAVFFREPVIQHYNPECRIHLETDTSEHAAEMVQGRPGGTKIIDVLNLLLEAQGDDSSVQARFTKTESQQSE

SEQ ID NO: 71 - protein, 678 aa, Yarrowia lipolytica
MNSSDSTNNTSPHSSATCSTAPTTSSVPAVTFLPTPQSPDFSHEHARYLNWLRSIYPVHTIPIFTGDAVLVSQNAQLAHDWLIAVENFLCTFPVPHHARPHLLGSRLFGSAGLWWRQSMAKNILSNWHEFKSNFASYWCPEFNSQTESHFFHKVRQGVAETAAEFAQRRLQVGKMAGVPKTYHVSLRRSRKLIYDPDNQVYLCMVKPRRDSEAVSREELELISKNKDIVVNTPPDLAKSPFCVNYGLCRHETEFVEYHVNRMLEEGLVDPTQSVYGAPVLIIISKDGEFRMCTDHRILDDRSINDRFWLPKTDEILSQIGHNGVFSKLHLFSGYYQAFKKPTGLSNNVISIFPLDLREDRDNHLGLSEVLDQLGGCLSGVAFDEFDNLIVCSKDRETHTADLDNVLRVLRQRHIYVNKYQSDMFKSSLELLGHIVDKQTCRPDPLKVCTIVNWRAPLNTTDTASFLHLAGYYRRYIPDFALVARPMALLCGGNKPFDWTEKCQSAFDLIKTTLVRAAPVRLETLRGAYRLSTEIFETCFSVVLEQQDASGMFHVVDRKSARFHGLELRFTEYEKNVKAIVYALRKWRIGHGLFLIQTRFPLSRDIILNPAYLKGSSLSRWLHFIHAHQFEVADISQNKMQKNGTDGLKRGVEVDGKMGVDNVVDSGANSLAKRVCVEN

SEQ ID NO: 72 - protein, 1800 aa, Oryza sativa; identical to SEQ ID NO: 69

SEQ ID NO: 73 - protein, 982 aa, Ustilago hordei
MHLPSATLDANPRMFKPRLYRVSPCDRQAIDLVFDELTWQGHLTTAPPGTPCSWPVFVVYHEGKPCPVVDLRQLNDVVDPDVYPLPTPDKLREKLAGAKYITMFDLCKAFYQMLLHPDDHWKATVLTHCGQETLSCTIMGQSHSVSFLQQVLTEAFKVDRLSTMAFVYVDDFGVHSNSLDEHMDHIHTVLGVIQTLGLTLAQDKAHVACKEVPLLGHLVSRQGTRTMPSKCEAIKSIPYPAMLNQLEHMVGFFSYYKNYVPHFSALIAPLQHLKTTLLRLSPKTRQARKCYCTGMSVPDDTSTRQSLTKLKTILQDWALQFPDYSQPFLLYVDTSQQHGFALALHQNHQDSGIGDSIQCIDAIHLNSTDASAKAPVWFDSHALKPAEKSYWPTELEAAAAVWALFRMKRFLDALPGPHLLFTDHLAVTSIADAKPFSSTPAARNPRLVRFTLILAEFCPKLWILHRKGIYMAHVDALSRIQASETELASFHAHELIIDPGLIAHILQSQQSDSMLQLLHQELTATGKGTLPFDNGSFGLNADNILCRITPSGVWKPCIGTAALPRIIGLVHTGHLGTKATFDRFRAVAYAPHLLCHVEDFVKCCTQCQQMRTLHHWPYGSLQPLPAPDTPFTTISCDFIVCLPLACTLFDLDPVDTVLILTDTATCRIYLLSSTTTWSTERWSLRYVEQLLPHVGWPKKIISDRDLQLTSQFWCSLNTCYSCELIFSTAHHKSNGQSKRAIQSVELLLRGLCNAWSDDWADHLPLVELLLGNRPNASMNAAPNDLLYGLRLHDPFTMLQLVMSLSDLTLLDCCLALCQQALDHLALVQAYMHQWYNSLHTPPPKLAISDWVWLELHDGYLLPPSFLPPDQRLGIQHIGPYPIKHMVSNLAYEISLPLESHLHPVISIQHLEPYMPSDKPITTSLVTEILKEHKTHCCSKQYLVCFEHASCDKWVLENTVTNPAILEQWHLRRPLLPPSASPD

SEQ ID NO: 74 - protein, 2101 aa, Chaetomium globosum
MTGDFYKRAFWKRTILNPGLRHRSSRLNYRVTHLDEACGDRWAETPDDVDRNYQWQWDGYPYPQLLPVAQNGWLKIREPATPLRQTVPHLARIRRAISPRIGSCQPLRHTRHLQHHQQSDDPMPTPAVDRQLRARQLLRFVGTDHPHVTHVDRKDIDHARSFYSWFKKWRPVTTTSTPSISSVGSNNHHQAVTTDCPSERNNQPVETASNASEEISTPTLYTHASSTRPSSPTPTTSDLPSTGNTPKTSTYRRSTSTDNNVDMADNGRRQPVPDPDGPLTAQAAAALMAAAFRQHRENQNADMGNLLAAAIDHQQRQQPAASTALQAVDVGYFDPSAKDPSGAGLISGGKINKYTDIFPFCDRLVDLAATHGDDAVRRIWSQCLQGPALVWHSHILTDDDRELLRTATINAICNKLKSRFKIDYSVALDTLKQSRFTMSDVANDKDIMAFVQTMMRNAKACDMSRHGQLIAAFEALDGDIQSELDKPTSTTEIDSFLRQIQERESVLRKRAQRFRQPQQPYRQHHIGIRGNNNNSHSGTVINNNGINHKAKIRGQGLQPQGQQWQYNQYNVGNQPANNQRQYGQQQQQAQQPGAVVPENRRLPAPPQRNQYRPPTPGRAIPAFHGSAQYQQPSVEDAPEQDVAGPDDFGPAESYYGNAPYPDDEYPAAPEWLDVDHRGPDTDTTDTPDDVVAQFVSLSIASKCRHCAKSFPSNNKLMAHIYADHLKRPRPDRKARADTAGAIPSAREVVDAHLAEAHPVADDPMHLSKIVESKNHPRPRSRLYRNVGRQAMVGRPHTVIRHRASPLMVRGIGKGVHNTLDYAIIDLNFYGTLPSGSTAIASFTREVTIVDDLRANMLLGMDCMTPEKFDILLSDEAIVINSCGGIRIPITTKRHGKPIKSKVIAKHRISIPPQTLASIAVNHAVHVDDGQTLLFEPATLNVSVFAAVADCHMESAIVRNDTNRPITVHANQCVGHLVSMEPDCQAYLVDDAAAAELAVHKPAPPPEERRLATMTEDDIKLNTIQHPCGVTIYNLPPAQMAPLWSLVTEYQDVFKDKGFVNLDQDQWMRVKLRPGWHETLPKKCRIYPMNAEDRGVVKDTIGKLESGGKATKTRFQVPFSFPVFVVWRTMPDGTRKGRMVVDIRMLNKIVLPDAYPMKSQDDIMARLANAKYITILDAVAFYYQWLVDPRDRWVFTMNTPEGQYTFNCVVMGYRNSNAYVQRQMNLLLKHIDAADAYCDDVAIGSRKFDTDDGHLAHLRRVFDALRRRNISIGPSKSFIAFPSATVLGRMVNSMGMSTTTERLSAITKLNFPATLKDLEYFIGATGWLRHNVPLYSILVEPLQRRKTALLKTRNRKGKRRSWSHAVQLLLPTSEELASFEAVKAALSRHTTLAFFRDADPFCIDVDVSALGIGAEVYHIEPAALQKVTKDGLIVKYPPRTAIQPLAYLSRTLSLAERDYWPTEMEVLGLVWVLAKCKRWITATKSSPLYVFTDHKSILGLNNRTADITSSTSTTNKRLIRAAEFFSTFDLRIQHKPGKFHVVADALSRLPSTNNVTDPQAPGGLDNLPNDREEHWAFCAATAPLRLPSIRTFPEPADKDVDLGQPTATTTSGIVTLDIHPEFVERLQEGYLQDPVWKRTMTVIRQNNSLLPANRANLPFELHKGLLWKTGGQVPRLCVPRTCLTDILNAIHDGNHRGFQALRTRLSNFCISQPTKMLRAYVNACPQCKANDRRHHSPYGSLQPLTGNECPYYMITIDFIVDLPTSTDKLDVALVIVDKLSKETQIVLGKSTWKSSHWGPQLLNRLLTANWGLPKVILSDRDPKFTAALWRAIWKTLGTNLLYTTAYHPSTDGQSERTIQTIESALRHYIQALDDFTRWPETVPRLQFEHNNIRSRTTGKSPNEIVKGFNPVAVADVIGDHQPARDPNLPQLRMEAHDAVAIAAMTMKHYYDRRHMPRFFDVGSKVWLRVHKGYNMPATDLIGPKFSQQYAGPLEVVERVGRSAYRLRLPPSWRIHDVVSIDHLEPHTFDPYGRQLPAIQPVTTHNQTVKAIVSHRLRGNGNQYLVKYDGLGAEFDQWLPEQRLASIAPGILQQWLQQQQHHK

SEQ ID NO: 75 - protein, 287 aa, Coprinopsis cinerea
MPAITQYDPALPLFQPIGRTNNNITINPIACPVYRKLSHDDFLLAVDANGTETACIRQETAVSLWTTLKDIGLAINKAGNPGRNEAVHLLNQYYEIPHYKFDRLGLQRPLILDLVRPNLHNIFNPLYAWGPKEYLTKTYQALQIVGRVALRWIDDAKKVCQELGPDCGWDWEEGNEIEEEAPPMPIQAHPLNPYNDLTTRDPRVRPYPARQEIRNSTNRDLILHPTASSAARANMQIVVHPNRSNAARANNSVTIYRRGNRMARASAYSTDGSEYVIRNGKQTNTNF

SEQ ID NO: 76 - protein, 2876 aa, Oryza sativa; identical to SEQ ID NO: 63

SEQ ID NO: 77 - protein, 1412 aa, Arabidopsis thaliana
MSKEVGATPGLVPTHSPEVQGPKSYANVVSSRPSLTKFNVDVSVVDGKSMVVVPDVVLEDSVPLWDDFLVGRFPSSAPHIAKIHVIVNKIWNLGDKSIRIDVFAVNDNTVKFRIRNASARLRALRRGMWNICDLPMIVSKWTPIVEDAQPEIKSMPMWVVIKNVPYSMFTWPGLVAVGNDLVESVPLVDSQALEVVKGDIAEEVEEGEIASNSNQKSVQGEKIQEEGDWLTVSSSGGKKYISKVRKDFNLWSILEEVQNEDSVGKETEDSVKGVLEVVVVEGKEEMALNKTQQVKSCFDGASTRVSIPRSSKKAHKFVSVPNQKATDVLPRQFGCVLETRVIESKVPVIFAKVFKDWQMVSNYEFNRLGRIWVVWSSSVQLQVIFKSSQMIVCLVRVEHYDVEFICSFIYASNFVEERKKLWQDLHNLQNSVAFRNKPWLLFGDFNETLKMEEHSSYAVSPMVTPGMRDFQIVVRYCSLEDMRTHGPLFTWGNKRNEGLICKKLDRVLLNPEYNSAYPHSYCIMDSGGCSDHLRGRFHLRSAIQKPKGPFKFTNVIAAHPEFMPKVEDFWKNTTELFPSTSTLFRFSKKLKELKPILKDLSRNNLSDLTRRATYAYEELCRCQTKSLTTLNPHDIVDESLAFERWEKERHLLNAIHEVMDPQGTRPPNQDDIKIEAVRFFSDLLSSQPSDFTGISVDELKGILQYRYSLHEQNLLVAEITEAEVMKVFFSIPLNKSPGPDGYTVEFFRETWSVIGQEVTMAIKSFFTYGFLPKGLNSTILALIPKRTYAKEMKDYRPISCCNVLYKAISKLLANRLKCLLPEFIAPNQSAFISDRLLMENLLLASELVKDYHKDGLSPRCAMKIDLSKAFDSVQWPFLLNTLAALDIPEKFIHWINLCISTASFSVQVNGLRQGCSLSPYLFVICMNVLSAMLDKGAVEKRFGYHPRCRNMGLTHLCFADDIMVFSAGSAHSLEGVLAIFKDFAAFSGLNISLEKSTLFMASISSETCASILARFPFDSGSLPVRYLGLPLMTKRMTLADCLPLLEKIRSRISSWKNRFLSYAGRLQLLNSVISSLTKFWISAFRLPRACIREIEQISAAFLWSGTDLNPHKAKVAWHDVCKPKSEGGLGLRSLVDANKICCFKLIWRLVSAKHSLWVNWIQNNLIRTVAEALSSHRRRSHRDDILNDIEEELEKLLCRGICTEQDRSLCRSIGGQFKAKFFSPEIWHQIREQGLVKQWHKAIWFSGATPKFTFISWLAAHDRLTTGDKMASWNRGISSVCVLCNISAESRDHLFFSCNFSSHIWDRLTRRLLLCRYTTNFPALLLLLSGQDFSGTKRFLLRYVFQATIHTLWRERNKRRHGDLPIPSDHIIKFIDRQTRNRLSTITKQGLHKYADGLRIWFAARDNLTPNH

SEQ ID NO: 78 - protein, 1255 aa, Aspergillus oryzae
MNKTLRVIQLNVRKQGAVHESLMNDEETQNTVALAIQEPQARRIQGRLLTTPMGHHKWTKMVPSTWREGRWAVRSMLWINKEVEAEQVPIESPDLTAAVIRLPERLIFMASVYVEGGNASALDDACNHLLDAITKVRRDTGVVVEILIMGDFNRHDQLWGGDDVSLGRQGEADPIIDLMNECALSSLLRRGTKTWHGGGHSGDCESTIDLVLASENLADSVIKCAILGTEHGSDHCAIETVFDAPWSLPKHQGRLLLKNAPWKEINTRIANTLAATPSEGTVQQKTDRLMSAVSEAVHALTPKSKPSSHAKRWWTADLTQLRQIHTYWRNHARSERRAGRKVPYLETMAQGAAKQYHDAIRQQKKKHWNQFLADNDNIWKAERYLKSGEDAAFGKIPQLLRADGTTTTDHKEQAEELLAKFFPPLPDNIDDEGTRPQRAPVEMPAITMEEIERQLMAAKSWKAPGEDGMPAIVWKMTWPTVKYRVLDLFQASLEGGTLPRQWRHAKIIPLKKPNKENYTIAKSWRPISLLATLGKVLESVVAERISHAVETHGLLPTSHFGARKQRSAEQALVLLQEQIYAAWRGRRVLSLISFDVKGAYNGVCKERLLQRMKARGIPEDLLRWVEAFCSERTATIQINGQLSEVHSLPQAGLPQGSPLSPILFLFFNADLVQRQIDSQGGAIAFVDDFTAWVTGPTAQSNREGIEGIIKEALHWERRSGATFEAEKTAIIHFTPKTSKLDREPFTIKGQAVEPKDHVKILGVLMDTSLKYKEHIARAASKGLEAVMELRRLRGLSPSTARQLFTSTVTPVVDYASNVWMHAFKNKATGPINRVQRVGAQAIVGTFLTVATSVAEAEAHIATAQHRFWRRAVKMWTDLHTLPDTNPLRRNTARIKKFRRFHRSPLYQVADALKNIEMETLETINPFTLAPWEARMQTDGEAMPDPQAIPGGSIQIAISSSARNGFVGFGVAIEKQPPQYRKLKLKTFSVTLGARSEQNPFSAELAAIAHTLNRLVGLKGFRFRLLTSNKATALTIQNPRQQSGQEFVCQMYKLINRLRRKGNHIKILWVPASEDNKLLGLAKEQARAATHEDAIPQAQVSRMKSTTLNLARSQAATTKALPEDVGRHIKRVDAALPGKHTRQLYDGLSWKEATVLAQLRTGMARLNGYLYRINVAQTDQCACGQARETVEHFLFRCRKWTTQRIALLQCTRTHRGNLSLCLGGKSPSNDQQWVPNLEAVRASIRFAMTTGRLDAV

SEQ ID NO: 79 - protein, 1087 aa, Danio rerio
MTHANGQTTNKIYVTCICGKLCKNHWGLKIHLARMKCLEQESKVQRTGPEPGETQEEPGPEATHRAKSLHVPEPQTPSEVVQQRIKWPPASKRSEWLQFDEDVSNIIQAIAKGDADSRLKTMTTIIFSYALERFGCIEKGKTKPTTPYTMNRRATQIHHLRQELRSLKKLYKKATDEEKQPLAELKNILRKKLMILRRAEWHRRRGRERARKRAAFITNPFGFTKQLLGDKRSGRLECLIEEVNRFIEETVSDPLREQELEPNKALISPTPPAREFSLRGPSLKEVKEIIKASRSASTPGPSGIPYLVYKRCPGLLLHLWKILKVIWQRGRVAEQWRCAEGVWIPKEENSKNINQFRIISLLSVEGKVFFSIVSRRLTEFLLENNYIDPSVQKGGIPGAPGCLEHTGVVTQLIREAHENRGDLVVLWLDLANAYGSIPHKLVELALHRHHVPSKIKDLILDYYNNFKMRVTSGSETSSWHRIGKGIITGCTISVILFALAMNMVVKSAEVECRGPLTKSGVRQPPIRAYMDDLTITTTTVPGSRWILQGLERLIAWARMSFKPSKSRSMVLKKGKVVDKFHFSISGSVNPTITEQPVKSLGKLFDSSLKDSAAIQKSKKELGAWLAMVDKSGLPGRFKAWIYQHSILPRVLWPLLIYAVPMSTVESLERKISGFLRKWLGLPRSLTSAALYGTSNTLQLPFSGLTEEFIVVRTREALQYRDSRDGKVSSACIEVRTGRKWNAGKAVEVAESRLQQKALVGTVATGRAGLGYFPKTLVSQVKGKERHHLLQGEVRASVEEERVSRVVGLRQQGAWTRWNTLQCRITWANILHADFQRVRFLVQAVYDVLPSPSNLHIWGKNETPSCLLCSGRGSLEHLLSSCPKALADGRYRWRHDQVLKAIAASLASAINTSKNHRAPRKAVHFIKAGEKPRALPQLTTGLLHKASDWQLEVDLGKQLRFPHHIAATRLRPDIIAISEASRQLIILELTVPWEERIEEANERKRAKYQELVEACRERGWRTYYEPIEIGCRGFAGRSLCKVLSRLGITGVAKKRAIRSASEAAEKATRWLWIKRADPWTAVGTQVGT

SEQ ID NO: 80 - protein, 769 aa, Coprinopsis cinerea
MERSVEEKRKNWRMVDWKEYREKLEANLRKEMGVGEIEDEDELEVEVDALIRAIGMTTEQVVKILERVDWSRGWWNDECRRKKKEFNEARREAWKYRAMPEHPALEEERRIGREYRTLIERTRTECWNEWVREVTELQTWTLNKFIGNTPGDGGLDRMPTLRWTDENGVEVIATDGRSKAKGLVRQLFPERPAESGVPEGYEYPEPVEYEARMTEERIKGAIKSLKAYKAPGPDGIPNVVWKECVELLAPQLERIFKAVYEKGMYSERWKEWTTVVLKKPGKPRYDTPKAWRPIALMNTMGKILTALLTEDLKYVTEKYSLLPNTHFGGRPGRTTTDAIQLLTSWIKGHWRKGNVVSVLFLDIEGAFPNVVVSRLAHNMRRRRVPEFIVKLIEHQLRDRRTKLKFDDYESEWVPIDNGSGQGDPKSMLEYLFYNADLIDLVAGLGEELEEGENGEDAPRGSARERGTEKRDENAAAFVDDAWLGGAGATFEEANETLKDMMNRRGGAMEWSKKHNSKFEISKLVYMGFTRRMRRTREGEGGKMTAEERPELEMEGAGNDGGGEGDKVEHGVQENGESEERSGTEGAEDVVQRGDDTKGNIRIGNMVHTSEGDRGEEEEGGISFGDSKTHESTQNLPASNNWSAKDNGHGRLGDPRGDTTINGNAQLDMSKGLDTVVNCCFLAYKSLIALASLVALSSLALPLWFQDTTSDDPESTPTTQGSAISGKETTEETPVADTQAGRSIPRNTDDETGNHRTGCESTKRATTIRN

SEQ ID NO: 81 - protein, 478 aa, synthetic construct
QKEPTQDVTLPQTWLTDFPQAWAETAGMGLAVQQAPLVIELKATATPVSIKQYPMSREARRGIKPHIQRLLDQGILVPCQSPWNTPLLPVKKPGTNDYRPVQDLREVNKRVEDIHPTVPNPYNLLSGLPPERQWYTVLDLKDAFFCLRLHPTSQPLFAFEWRDPETGMSGQLTWTRLPQGFKNSPTIFDEALHRDLADFRIQHPDVTLLQYVDDLLLAADTEQDCLKGTQALLQTLGELGYRASAKKAQICQREVTYLGYKLKGGQRWLTEARKETVLQIPTPKTARQVREFLGTAGFCRLWIPGFAELAAPLYPLTKEGSAFNWGEKEEKAFQELKQALLTAPALGLPDLTKPFQLFVDEKQGIAKGVLTQKLGPWRRPVAYLSKKLDPVAAGWPPCLRMVAATALLTKDAGKLTMGQEIVILTPHAVEAVLKQPPDRWLSNARMIHYQALLLDTPRVQFHPTVALNPATTEPLPES

SEQ ID NO: 82 - protein, 478 aa, synthetic construct
SKEPKQDVTLPQTWLSDFPQAWAETAGMGLAVQQPPIVIQLKATATPVRIKQYPMSREARRGIKPHIQRLLDLGILVPCQSPWNTPLLPVKKPGTNDYRPVQDLREVNKRVEDIHPTVPNPYNLLSSLPPERQWYTVLDLKDAFFCLPLHPESQPLFAFEWRDPETGRSGQLTWTRLPQGFKNSPTIFDEALHRDLADFRIQHPDLTLLQYVDDLLLAADTEQDCLKGTQALLQTLGELGYRASAKKAQLCQREVTYLGYKLKGGQRWLTEARKETVLQIPTPKTPRQVREFLGTAGFCRLWIPGFAELAAPLYPLTKEGNAFNWGEKEEKAFQELKQALLQAPALGLPDLTKPFQLFVDEKQGIAKGVLTQKLGPWKRPVAYLSKKLDPVAAGWPPCLRMIAATALLTKDAGKLTLGQEIVILTPHAVEAVLKQPPDRWLSNARMIHYQALLLDTPRVQFDPSVALNPATTETLPES

SEQ ID NO: 83 - protein, 446 aa, synthetic construct
LTQGDIQEINPEVWATEGKYGCLDIPPIKIEMQKDTPAIRVKQYPMSPEGKKGLASVIEHLLKENILEPCMSPHNTPILAIKKDEGKFRLVQDLREINKRTIARHPVVPNPYTLLSKIPREHTWFTVIDLKDAFWACPLAEECRDWFAFEWEHPDRGRKQQLRWTRLPQGYTESPNIFGQALETLLEQFSPKEGVQILQYVDDLLISGETEKEVKDVSIQLLNFFGEKGLKVSQSKLQFVETEVTYLGHIIGKGSKRLSPARISGIVSISPPKTKRDIRKLLGLFGYCKHWIDKYTQGVKFLYDKLIDQEPMNWTESDEKQLQDLKEKLSSAPVLSLPDLKKEFDLFVNTEEGIAYGVLTQEWGGYRKPVAFLSKLLDPVARGWPACLQAVAAAAILIEEAQKLTLQGKIPHDLKTILSQRAQDNLELTTSPHQRDRTLTFKRNKR

SEQ ID NO: 84 - protein, 468 aa, synthetic construct
LTQEDIEEINPEVWAEEGKSGLLDIPPIKIEMQKETPPIRVKQYPISPEGRKGLAPIIEQLLKEGILEPCMSPHNTPILAVKKAEGKYRLVQDLREINKRTVTRHPVVPNPYTLLSQIPREHAWFTIIDLKDAFWACPLAEECRDWFAFEWEHPETKRKQQLRWTRLPQGFTESPNLFGQALEKLLEQFSPEEGVQILQYVDDLLISGEDQSEVRETSIQLLNFLGEKGLKVSKSKLQFVESEVTYLGHLIGKGYKRLSPERIAGILSIPPPKTKRDIRKLLGLFGYCRLWLDKYTQSVKFLYDKLVDSEPIEWTEEDEKQLKDLKEKLSSAPVLSLPDLKKEFDLFVNTEEGVAYGVLTQEWGGCKKPVAFLSKLLDPVARGWPTCLQAVAAAAILIEETQKLTLQGKIRVHTPHDLKTILSQKAQKWLTDSRILRYEIALMNTDNLEFTTSPIQRDRTLTFKRNKK

SEQ ID NO: 85 - protein, 644 aa, synthetic construct
LTLEDEEKINPEVWYTPDSVGRLDIEPITVTIKDPDTPIRIKQYPISLEGRRGLKPVIERLLSKGLLEPCMSPHNTPILPVKKPDGSYRLVQDLREINKRTVTRFPVVANPYTLLSKLSPENQWYSVIDLKDAFWACPLDEESRDYFAFEWEDPETHRKQQLRWTVLPQGFTESPNLFGQALEQLLQEYQTGEGVTLIQYVDDLLIAGETEEEVRKESIKLLNFLGLKGLKVSKAKLQFVEEEVKYLGHWLSKGEKKLDPERVKGILSLPPPKSKRQIRQLLGLLGYCRQWIENYSSKVKFLYEKLSQGGLVKWTEEDEKQLKRLRQDLIQAPVLSLPDLKRPFYLFVNTDNGTAYGVLTQEWAGKKKPVGYLSKLLDPVSKGWPTCLQAVVACALLTEEAHKITFNSELKVLSPHNIRGILQQKADKWITDSRLLKYEGILLDSPKLTLEVTGLQNPAQFLYDEKPVAHNCMATIEEQTKIRPDLEEEELETGERLFVDGSSRVIEGKRVSGYAIIGGPEVIESGPLNKTWSAQACELYAVLRALERLKDKEGTIYTDSKYAFGVVHTFGKIWENAADQEAKKAALTESEQKLKALFLPKRLSIIHCPGHQKGHSAEARGNRMADQAARKAAITETPDTSTLL

SEQ ID NO: 86 - protein, 644 aa, synthetic construct
LTQEDEEKINPEVWHTEDEAGRLDIEPISIEIERPEDPIRIKQYPISLEGRRGLKPIIERLLKKGILEPCMSPHNTPILPVKKPDGSYRLVQDLREINKRTVTRFPVVANPYTLLSRVSPENQWYSVIDLKDAFWACPLAEESRDYFAFEWEDPETNRKQQLRWTRLPQGFTESPNLFGQALEQLLQQFSPGEGVTILQYVDDLLIAGETEEEVREATIKLLNFLGEKGLKVSKSKLQFVEPEVKYLGHWISKGKKRLDPERVAGILSLPPPKSKRQIRQLLGLLGYCRQWIENYSQKVKFLYEKLTEGGKIKWTEEDEKQLKRLKQALITAPVLSLPDLKKPFHLFVNTDNGTAYGVLTQEWAGVKKPVGYLSKLLDPVSRGWPTCLQAIVAVALLIEEAQKITFGGELIVYTPHNVRTILQQKAEKWLTDSRLLKYEAILLNAPKLELRVTKLQNPAEFLYLEKPVSHNCTDTIEEQTKVRPDLEDEELEEGEKWFVDGSSRVIEGKRKSGYAIINGKEVIESGPLNASWSAQACELFAVLRALERLKGKVGTIYTDSKYAFGVVHTFGKIWENLADQEAKKAALTESRQKLKALFLPKRLSIIHCPGHQKGHSAEARGNRMADQAARKAAITETPDTSTLL

SEQ ID NO: 87 - protein, 646 aa, synthetic construct
LTLEDEEKINPEVWHTEDEAGRLDIEPITIEIERPEDPIRIKQYPISPEGRRGLKPIIERLLKKGILEPCMSPHNTPILPVKKPDGSYRLVQDLREINKRTVTRYPVVPNPYTLLSKVSPEHQWFSVIDLKDAFWACPLAEESRDIFAFEWEDPETGRKQQLRWTRLPQGFTESPNLFGQALEKLLQQFSPPEGVTILQYVDDLLIAGETEEEVREATIKLLNFLGEKGLKVSKSKLQFVEPEVKYLGHLISKGQRKLSPERVAGILSLPPPKSKREIRKLLGLLGYCRLWIEGYTETVKFLYEKLTEGGKIKWTEEDEKQLQELKQALTTAPVLSLPDLKKPFHLFVNTEEGIAYGVLTQEWGGCKKPVAYLSKLLDPVSRGWPTCLQAVAAVAILIEEARKLTFGGKLVVYTPHAVRAILQQKAEKWLTDSRLLKYEAILLDKPRLELHVTKLVQNPAEFLYLEPKPVHHDCTETLEENTKRRPDLEDEELEEGEKWFVDGSSRVIEGKRKSGYAIINGKEVIESGPLNASWSAQACELFAVLRALERLKGKVGTIYTDSKYAFGVVHTFGKIWENLADQEAKKAALTESRQKLKALFLPKRLSIIHCPGHQKGHSAEARGNRMADQAARKAAITETPDTSTLL

SEQ ID NO: 88 - protein, 480 aa, synthetic construct
LTQEDEEKINPEVWHTEEEAGRLDIEPISIEIERPEDPIRIKQYPISLEGRRGLKPIIEQLLKKGILEPCMSPHNTPILPVKKPDGSYRLVQDLREINKRTVTRYPVVPNPYTLLSKVPPEHQWFSVIDLKDAFWACPLAEESRDIFAFEWEDPETRRKQQLRWTRLPQGFTESPNLFGQALEKLLQQFSPPEGVQILQYVDDLLISGEDEEEVREATIKLLNFLGEKGLRVSKSKLQFVEPEVKYLGHLISKGSKRLSPERIAGILSLPPPKSKREIRKLLGLLGYCRLWIEKYTQTVKFLYEKLTEGDKIKWTEEDEKQLKKLKQKLTSAPVLSLPDLKKPFHLFVNTEKGVAYGVLTQEWGGVKKPVAYLSKLLDPVSRGWPTCLQAIAATAILIEEAQKLTFGGKLIVYTPHNVRTILNQKAEKWLTDSRLLKYEAALMNKPRLELHVTKIVEDPAEFTYTPVQHDCTLTLKRQKK

SEQ ID NO: 89 - protein, 465 aa, synthetic construct
LTLEDEEKINPKVWHTGREAGRLDIEPISIEIERPEDPIRIKQYPISLEGRRGLKPIIEDLIKKGILEPCMSRHNTPILAIKKTDGSYRLVQDLRAINERTKTRFPVVANPYTLLNRVSPEDTWYSVIDLKDAFWTCPLAEGSRDYFAFQWEDPDTNRKQQLRWASLPQGFVDSPNLFGQALEQLLSQFSPGEGTKILQYVDDLLVAGETEEDVRECTIELLNFLGEKGLKVSKSKLQFTEPEVKYLGHWITKGKKKLDPERVAGILELPPPKNKRQVRQLLGLLGYCRQWIEGYSEKVKFLYEKLTTDKIKWTEQDEKELQRLKEALITAPVLSLPDVKKKFQLFVDVSNHTAHGVLTQEWAGDKKPVGYLSKLLDPVSRGWPTCLQAIVAVALLIEEAKKITFGGDLVVYTPHNVRLILQQKAERWLTDARLLKYEAILIHAPELELRVTKASNPAEFLYLGK

SEQ ID NO: 90 - protein, 647 aa, synthetic construct
LPTQVEDAVVPWVWSTEGPGKSIAVEPVVIELKEGEQPVRIKQYPMKPEARRGIKPIIEQFLKLGILEECQSEYNTPILPVKKPNGEYRLVQDLRAVNKITEDIYPVVANPYTLLTSLSPEHQWFTVIDLKDAFFCIPLEPESQKIFAFEWENPETGRKTQLTWTRLPQGFKNSPTIFGEQLAKDLEEWKAPPESGVLLQYVDDLLIATETKEACIKATIALLNFLGQKGYRVSKKKAQLVQQEVIYLGYEISGGQRKLGPDRKEAICQIPKPKTVKELRSFLGMVGWCRLWIPNYGLLAKPLYELLKEGSDKLNWTKEAEKAFQELKQALTTAPALGLPDLSKPFQLFVNEKQGIALGVLTQKLGPWRRPVAYLSKQLDTVAAGWPSCLRAVAAVAILIQEARKLTMGQKMVVYVPHAVSAVLEQKAGHWLSSSRMLKYQAILLEQDDVELAVTNVLNPATFLYSEPEPVHHDCLETIEASYSSRPDLKDTPLEDAEEWFTDGSSYVISGKRKSGYAVTTCKEVIESGPLNPSYSAQKAEIIALTRALELAKGRTVNIYTDSRYAFGVVHAHGAIWKELADREAKKAAKTELQQSLKALFLPKRLSIIHCPGHQKGHSAEARGNRMADQAARKAAITETPDTSTLL

SEQ ID NO: 91 - protein, 647 aa, synthetic construct
LPKQVEDAVVPWVWSTEGPGKAVAVEPVVIELKPGEQPVRIKQYPMKREARKGIKPIIERFLKLGILEECQSPYNTPILPVKKPNGEYRLVQDLRAVNKITVTIYPVVPNPYTLLSSLSPEHQWFTVIDLKDAFFCIPLEPESQKIFAFEWEDPETGRKTQLTWTRLPQGFKNSPTIFGEALAKDLQEWKAPPESGTLLQYVDDLLIATETKETCIKATIALLNFLGEKGYRVSKKKAQLVQQEVTYLGYEISKGQRRLSPDRKEAICQIPKPKTVRELRSFLGMVGWCRLWIPNYGLLAKPLYELLKEGSDPLNWTEEEEKAFQQLKQALTTAPALGLPDLSKPFQLFVNEKQGIALGVLTQKLGPWKRPVAYLSKQLDPVAAGWPSCLRAVAATAILIQEARKLTLGQKMVVYVPHTVSAVLEQKAGHWLSSSRLLKYQAILLDQPDVELKVTKVINPATFLYSEPEPVHHDCLETIEASYSSRPDLKDTPLEDAEEWFTDGSSYVINGKRKSGYAIITCKEVIESGPLNPSYSAQKAELIALTRALELAKGRTGNIYTDSKYAFGVVHAHGAIWKELADREAKKAAKTDLQQPLKALFLPKRLSIIHCPGHQKGHSAEARGNRMADQAARKAAITETPDTSTLL

SEQ ID NO: 92 - protein, 666 aa, synthetic construct
LPTQVVTAVVPQVWLSPHLDLFYRTDFPKAWAETEGPGKAIQVEPVVIELKPGEQPVRIKQYPMSPEARRGIKPIIERLLKLGILEPCQSPYNTPILPVKKPDNGEYRLVQDLRAVNKRTVTIYPVVPNPYTLLSSLSPEHQWFTVIDLKDAFFCIPLAPESQPIFAFEWEDPETGRKTQLTWTRLPQGFKNSPTIFGEALAKDLQEFPAPPEGVTLLQYVDDLLIAAETEEACLKATIALLNFLGQKGYRVSKKKAQLCQQEVTYLGYEISGGQRKLSPDRKEAILQIPKPKTVKELRSFLGMVGYCRLWIPGYAELAKPLYELLKEGSDKLNWTEEAEKAFQELKQALTTAPALGLPDLSKPFQLFVNEKQGIALGVLTQKLGPWRRPVAYLSKKLDPVAAGWPSCLRAVAAVAILIQEARKLTMGQKMVVYTPHAVSAVLEQKADRWLSNSRMLKYQAILLDKPRVELHVTKVLNPATFLYSEPEPVHHDCLETLEESYSRRPDLKDTPLEDAEEWFTDGSSYVISGKRKSGYAIITCKEVIESGPLNPSYSAQKAELIALTRALELAKGRTVNIYTDSKYAFGVVHAHGAIWKELADREAKKAAKTELQQSLKALFLPKRLSIIHCPGHQKGHSAEARGNRMADQAARKAAITETPDTSTLL

SEQ ID NO: 93 - protein, 651 aa, synthetic construct
LTGQVVTAVVPQLWLTEDEGGLIQVEPVTIELKPGEQPVRIKQYPLSPEARRGIKPIIERLLKKGILEPCQSPYNTPILPVKKPDNGTYRLVQDLRAINKRTVTIYPVVPNPYTLLSSLSPEHQWFTVIDLKDAFFSVPLAPESQPIFAFEWEDPETGRKQQLTWTRLPQGFKNSPTIFGQALEKTLQEFPAPPEGVTLLQYVDDLLIAAETEEECLKATIALLNFLGQKGFKVSKKKLQLCQPEVTYLGHEISGGQRKLSPDRVAAILQLPKPKTVKELRSFLGLVGYCRLWIPGYTELAKPLYELLKEGSPPKDKLNWTEEAEKQFQELKQALTTAPALGLPDLKKPFHLFVNEKEGIALGVLTQKLGGHRRPVAYLSKKLDPVAAGWPSCLRAVAAVAILIQEARKLTMGQKMVVYTPHAVSAVLEQKADRWLSNSRMLKYQAILLDKPRVELHVTKVQNPATFLYSEPEPVHHDCLETLEESYSRRPDLKDTPLEDAEEWFTDGSSYVISGKRKSGYAIITCKEVIESGPLNPSYSAQKAELIALTRALELAKGRTVNIYTDSKYAFGVVHAHGAIWKELADREAKKAAKTELQQSLKALFLPKRLSIIHCPGHQKGHSAEARGNRMADQAARKAAITETPDTSTLL

SEQ ID NO: 94 - protein, 632 aa, synthetic construct
IPEEVEQAVVPWVWETDTPGKSKAAQPVVVELKEGKEPVRIKQYPIKPEARQGIKPIIDKFLKLGILEECESEYNTPIFPVKKPNGEYRLVQDLRAINEITKDIYPVVANPYTLLTSVSEKHEWFTVIDLKDAFFCIPLEKESRKLFAFEWENPDTGRKTQLTWTRLPQGFKNSPTIFGNQLAKELEEWKTTQVKVPPESYVLLQYVDDILIATEEKETCIKLTISLLNFLGQGGYRVSKKKAQLVRQEVIYLGCEISQGQRKLGTNRIEAICAIPEPRNHQELRSFLGMVGWCRLWILNYGLIAKPLYEALKEPRLTWGKQQEKAFLELKQALTEAPALGLPDLSKDFQLFVNERQRLALGVLTQRLGPWKRPVGYFSKQLDTVSAGWPSCLRAVAATVILIQEARKLTLGRKIEVYVPHMVTAVLEQKGGHWLSSSRMLKYQAILMEQDDVELKITNLINPAEFLSEEGPLAHDCVEIIEQTYASREDLKDVLLEQAEEWFTDGSSFGKNATGWAVSNNPQYSAQKAEIIAYIRAKGRTGNFYTDSRYAFGVVHAHGAIWKELADREAKKAAKTELQQSLKALFLPKRLSIIHCPGHQKGHSAEARGNRMADQAARKAAITETPDTSTLL

SEQ ID NO: 95 - protein, 447 aa, synthetic construct
LTGQVVTAVVPQLWLSLPPDPHLDLFYRTDFPKAAAIDDSLWSESEDEGGLIQVEPVKIKLKPGERPVRIKQYPLSPEAEQGIKPIIERLLKKGILEPTQSPYNTPILPVKKPDNGTYRLVQDLRAINKLTVTITPVVPNPYTLLSSLSPKHQWFTVIDLADAFFSVPLDPESQPIFAFTFENQQYTWTRLPQGFKNSPTIFSQALKKTLQEFPALPEGVTLLQYVDDLLIAAETEEECLKATIALLNFLAQKGFKVSKKKLQLCQPEVTYLGHEISGGQRKLSPDRVAAILQLPKPKTVKELQSFLGLVGYCRTWIPDYTELAKPLRELLRHEGSPPKDKLNWTEEAEKQFQELKKALTTAPALGLPDYKKPFHLHVNEKEGIALGVLLQKHGGHRRPVAYLSKKLDPVAAGWPSCLRAVAAVAIAIQEARHLVMGHKMVVYTPHA

SEQ ID NO: 96 - protein, 69 aa, synthetic construct
MSPSVQEVEKLHVLDRNGDGKVSAEELKAFADDSKCPLDSNKIKAFIKEHDKNKDGKLDLKELVSILSS

SEQ ID NO: 97 - protein, 387 aa, synthetic construct
MKIEEGKLVIWINGDKGYNGLAEVGKKFEKDTGIKVTVEHPDKLEEKFPQVAATGDGPDIIFWAHDRFGGYAQSGLLAEITPDKAFQDKLYPFTWDAVRYNGKLIAYPIAVEALSLIYNKDLLPNPPKTWEEIPALDKELKAKGKSALMFNLQEPYFTWPLIAADGGYAFKYENGKYDIKDVGVDNAGAKAGLTFLVDLIKNKHMNADTDYSIAEAAFNKGETAMTINGPWAWSNIDTSKVNYGVTVLPTFKGQPSKPFVGVLSAGINAASPNKELAKEFLENYLLTDEGLEAVNKDKPLGAVALKSYEEELAKDPRIAATMENAQKGEIMPNIPQMSAFWYAVRTAVINAASGRQTVDEALKDAQTNSSSNNNNNNNNNNLGIEGR

SEQ ID NO: 98 - protein, 495 aa, synthetic construct [sequence omitted]

SEQ ID NO: 99 - protein, 116 aa, synthetic construct
MSDKIIHLTDDSFDTDVLKADGAILVDFWAEWCGPCKMIAPILDEIADEYQGKLTVAKLNIDQNPGTAPKYGIRGIPTLLLFKNGEVAATKVGALSKGQLKEFLDANLAGSGSGHM

SEQ ID NO: 100 - protein, 109 aa, synthetic construct
MGLEVLFQGPGSMSDQEAKPSTEDLGDKKEGEYIKLKVIGQDSSEIHFKVKMTTHLKKLKESYCQRQGVPMNSLRFLFEGQRIADNHTPKELGMEEEDVIEVYQEQTGG

SEQ ID NO: 101 - protein, 220 aa, synthetic construct
MSPILGYWKIKGLVQPTRLLLEYLEEKYEEHLYERDEGDKWRNKKFELGLEFPNLPYYIDGDVKLTQSMAIIRYIADKHNMLGGCPKERAEISMLEGAVLDIRYGVSRIAYSKDFETLKVDFLSKLPEMLKMFEDRLCHKTYLNGDHVTHPDFMLYDALDVVLYMDPMCLDAFPKLVCFKKRIEAIPQIDKYLKSSKYIAWPLQGWQATFGGGDHPPKSD

SEQ ID NO: 102 - protein, 56 aa, synthetic construct [sequence omitted]

SEQ ID NO: 103 - protein, 138 aa, synthetic construct
MCMAGLAQHDEAVDNKFNKEQQNAFYEILHLPNLNEEQRNAFIQSLKDDPSQSANLLAEAKKLNDAQAPKVDNKFNKEQQNAFYEILHLPNLNEEQRNAFIQSLKDDPSQSANLLAEAKKLNDAQAPKVDANSAGKST

SEQ ID NO: 104 - protein, 297 aa, synthetic construct
MAEIGTGFPFDPHYVEVLGERMHYVDVGPRDGTPVLFLHGNPTSSYVWRNIIPHVAPTHRCIAPDLIGMGKSDKPDLGYFFDDHVRFMDAFIEALGLEEVVLVIHDWGSALGFHWAKRNPERVKGIAFMEFIRPIPTWDEWPEFARETFQAFRTTDVGRKLIIDQNVFIEGTLPMGVVRPLTEVEMDHYREPFLNPVDREPLWRFPNELPIAGEPANIVALVEEYMDWLHQSPVPKLLFWGTPGVLIPPAEAARLAKSLPNCKAVDIGPGLNLLQEDNPDLIGSEIARWLSTLEISG

SEQ ID NO: 105 - protein, 206 aa, synthetic construct
MKKWTNRLMTIAGVVLILVAAYLFAKPHIDNYLHDKDKDEKIEQYDKNVKEQASKDKKQQAKPQIPKDKSKVAGYIEIPDADIKEPVYPGPATPEQLNRGVSFAEENESLDDQNISIAGHTFIDRPNYQFTNLKAAKKGSMVYFKVGNETRKYKMTSIRDVKPTDVGVLDEQKGKDKQLTLITCDDYNEKTGVWEKRKIFVATEVK

SEQ ID NO: 106 - protein, 161 aa, synthetic construct
MKKWLLAAGLGLALATSAQAADKIAIVNMGSLFQQVAQKTGVSNTLENEFKGRASELQRMETDLQAKMKKLQSMKAGSDRTKLEKDVMAQRQTFAQKAQAFEQDRARRSNEERGKLVTRIQTAVKSVANSQDIDLVVDANAVAYNSSDVKDITADVLKQVK

SEQ ID NO: 107 - protein, 242 aa, synthetic construct
MNITDIMNAIDAIKALPICELDKRQGMLIDLLVEMVNSETCDGELTELNQALEHQDWWTTLKCLTADAGFKMLGNGHFSAAYSHPLLPNRVIKVGFKKEDSGAAYTAFCRMYQGRPGIPNVYDVQRHAGCYTVVLDALKDCERFNNDAHYKYAEIASDIIDCNSDEHDELTGWDGEFVETCKLIRKFFEGIASFDMHSGNIMFSNGDVPYITDPVSFSQKKDGGAFSIDPEELIKEVEEVAR

SEQ ID NO: 108 - protein, 194 aa, synthetic construct
MGSDTSNATSVVNVSASSSTSTIYDLGNMSKDEVVKLFEELGVFQAAILMFSYMYQAQSNLSIAKFADMNEASKASTTAQKMANLVDAKIADVQSSTDKNAKAKLPQDVIDYINDPRNDISVTGIRDLSGDLSAGDLQTVKAAISAKANNLTTVVNNSQLEIQQMSNTLNLLTSARSDVQSLQYRTISAISLGK

SEQ ID NO: 109 - protein, 117 aa, synthetic construct
MAMSNMTYNNVFDHAYEMLKENIRYDDIRDTDDLHDAIHMAADNAVPHYYADIRSVMASEGIDLEFEDSGLMPDTKDDIRILQARIYEQLTIDLWEDAEDLLNEYLEEVEEYEEDEE

SEQ ID NO: 110 - protein, 169 aa, synthetic construct
MKKESKKMKTILPAVLFAAFATTSAWAAESVQPLEKIAPYPQAEKGMKRQVIQLTPQEDESTLKVELLIGQTLEVDCNLHRLGGKLENKTLEGWGYDYYVFDKVSSPVSTMMACPDGKKEKKFVTAYLGDAGMLRYNSKLPIVVYTPDNVDVKYRVWKAEEKIDNAVVR

SEQ ID NO: 111 - protein, 134 aa, synthetic construct
MAEALFKEIDVNGDGAVSYEEVKAFVSKKRAIKNEQLLQLIFKSIDADGNGEIDQNEFAKFYGSIQGQDLSDDKIGLKVLYKLMDVDGDGKLTKEEVTSFFKKHGIEKVAEQVMKADANGDGYITLEEFLEFSL

SEQ ID NO: 112 - protein, 131 aa, synthetic construct
MDKKTIYFICTGNSCRSQMAEGWGKEILGEGWNVYSAGIETHGVNPKAIEAMKEVDIDISNHTSDLIDNDILKQSDLVVTLCSDADNNCPILPPNVKKEHWGFDDPAGKEWSEFQRVRDEIKLAIEKFKLR

SEQ ID NO: 113 - protein, 164 aa, synthetic construct
MTDVTIKTLAAERQTSVERLVQQFADAGIRKSADDSVSAQEKQTLIDHLNQKNSGPDKLTLQRKTRSTLNIPGTGGKSKSVQIEVRKKRTFVKRDPQEAERLAAEEQAQREAEEQARREAEESAKREAQQKAEREAAEQAKREAAEQAKREAAEKDKVSNQQDD

SEQ ID NO: 114 - protein, 329 aa, synthetic construct [sequence omitted]

SEQ ID NO: 115 - protein, 196 aa, synthetic construct
MKVAKDLVVSLAYQVRTEDGVLVDESPVSAPLDYLHGHGSLISGLETALEGHEVGDKFDVAVGANDAYGQYDENLVQRVPKDVFMGVDELQVGMRFLAETDQGPVPVEITAVEDDHVVVDGNHMLAGQNLKFNVEVVAIREATEEELAHGHVHGAHDHHHDHDHDGCCGGHGHDHGHEHGGEGCCGGKGNGGCGCH

SEQ ID NO: 116 - protein, 283 aa, synthetic construct
MAEITASLVKELRERTGAGMMDCKKALTEANGDIELAIENMRKSGAIKAAKKAGNVAADGVIKTKIDGNYGIILEVNCQTDFVAKDAGFQAFADKVLDAAVAGKITDVEVLKAQFEEERVALVAKIGENINIRRVAALEGDVLGSYQHGARIGVLVAAKGADEELVKHIAMHVAASKPEFIKPEDVSAEVVEKEYQVQLDIAMQSGKPKEIAEKMVEGRMKKFTGEVSLTGQPFVMEPSKTVGQLLKEHNAEVTGFIRFEVGEGIEKVETDFAAEVAAMSKQS

SEQ ID NO: 117 - protein, 330 aa, synthetic construct
MSQNTLKVHDLNEDAEFDENGVEVFDEKALVEQEPSDNDLAEEELLSQGATQRVLDATQLYLGEIGYSPLLTAEEEVYFARRALRGDVASRRRMIESNLRLVVKIARRYGNRGLALLDLIEEGNLGLIRAVEKFDPERGFRFSTYATWWIRQTIERAIMNQTRTIRLPIHIVKELNVYLRTARELSHKLDHEPSAEEIAEQLDKPVDDVSRMLRLNERITSVDTPLGGDSEKALLDILADEKENGPEDTTQDDDMKQSIVKWLFELNAKQREVLARRFGLLGYEAATLEDVGREIGLTRERVRQIQVEGLRRLREILQTQGLNIEALFRE

SEQ ID NO: 118 - protein, 348 aa, synthetic construct
MKKWSRHLLAAGALALGMSAAHADDNNTLYFYNWTEYVPPGLLEQFTKETGIKVIYSTYESNETMYAKLKTYKDGAYDLVVPSTYYVDKMRKEGMIQKIDKSKLTNFSNLDPDMLNKPFDPNNDYSIPYIWGATAIGVNGDAVDPKSVTSWADLWKPEYKGSLLLTDDAREVFQMALRKLGYSGNTTDPKEIEAAYNELKKLMPNVAAFNSDNPANPYMEGEVNLGMIWNGSAFVARQAGTPIDVVWPKEGGIFWMDSLAIPANAKNKEGALKLINFLLRPDVAKQVAETIGYPTPNLAARKLLSPEVANDKTLYPDAETIKNGEWQNDVGAASSIYEEYYQKLKAGR

SEQ ID NO: 119 - protein, 169 aa, synthetic construct [sequence omitted]

SEQ ID NO: 120 - protein, 124 aa, synthetic construct
MTMYATLEEAIDAAREEFLADNPGIDAEDANVQQFNAQKYVLQDGDIMWQVEFFADEGEEGECLPMLSGEAAQSVFDGDYDEIEIRQEWQEENTLHEWDEGEFQLEPPLDTEEGRAAADEWDER

SEQ ID NO: 121 - protein, 138 aa, synthetic construct
MANPEQLEEQREETRLIIEELLEDGSDPDALYTIEHHLSADDLETLEKAAVEAFKLGYEVTDPEELEVEDGDIVICCDILSECALNADLIDAQVEQLMTLAEKFDVEYDGWGTYFEDPNGEDGDDEDFVDEDDDGVRH

SEQ ID NO: 122 - protein, 613 aa, synthetic construct
MEQNPQSQLKLLVTRGKEQGYLTYAEVNDHLPEDIVDSDQIEDIIQMINDMGIQVMEEAPDADDLMLAENTADEDAAEAAAQVLSSVESEIGRTTDPVRMYMREMGTVELLTREGEIDIAKRIEDGINQVQCSVAEYPEAITYLLEQYDRVEAEEARLSDLITGFVDPNAEEDLAPTATHVGSELSQEDLDDDEDEDEEDGDDDSADDDNSIDPELAREKFAELRAQYVVTRDTIKAKGRSHATAQEEILKLSEVFKQFRLVPKQFDYLVNSMRVMMDRVRTQERLIMKLCVEQCKMPKKNFITLFTGNETSDTWFNAAIAMNKPWSEKLHDVSEEVHRALQKLQQIEEETGLTIEQVKDINRRMSIGEAKARRAKKEMVEANLRLVISIAKKYTNRGLQFLDLIQEGNIGLMKAVDKFEYRRGYKFSTYATWWIRQAITRSIADQARTIRIPVHMIETINKLNRISRQMLQEMGREPTPEELAERMLMPEDKIRKVLKIAKEPISMETPIGDDEDSHLGDFIEDTTLELPLDSATTESLRAATHDVLAGLTAREAKVLRMRFGIDMNTDYTLEEVGKQFDVTRERIRQIEAKALRKLRHPSRSEVLRSFLDD

SEQ ID NO: 123 - protein, 238 aa, synthetic construct
MSKGEELFTGVVPILVELDGDVNGHKFSVSGEGEGDATYGKLTLKFICTTGKLPVPWPTLVTTFSYGVQCFSRYPDHMKQHDFFKSAMPEGYVQERTIFFKDDGNYKTRAEVKFEGDTLVNRIELKGIDFKEDGNILGHKLEYNYNSHNVYIMADKQKNGIKVNFKIRHNIEDGSVQLADHYQQNTPIGDGPVLLPDNHYLSTQSALSKDPNEKRDHMVLLEFVTAAGITHGMDELYK

SEQ ID NO: 124 - protein, 214 aa, synthetic construct
MRIILLGAPGAGKGTQAQFIMEKYGIPQISTGDMLRAAVKSGSELGKQAKDIMDAGKLVTDELVIALVKERIAQEDCRNGFLLDGFPRTIPQADAMKEAGINVDYVLEFDVPDELIVDRIVGRRVHAPSGRVYHVKFNPPKVEGKDDVTGEELTTRKDDQEETVRKRLVEYHQMTAPLIGYYSKEAEAGNTKYAKVDGTKPVAEVRADLEKILG

SEQ ID NO: 125 - protein, 2172 aa, synthetic construct
MKRTADGSEFESPKKKRKVDKKYSIGLDIGTNSVGWAVITDEYKVPSKKFKVLGNTDRHSIKKNLIGALLFDSGETAEATRLKRTARRRYTRRKNRICYLQEIFSNEMAKVDDSFFHRLEESFLVEEDKKHERHPIFGNIVDEVAYHEKYPTIYHLRKKLVDSTDKADLRLIYLALAHMIKFRGHFLIEGDLNPDNSDVDKLFIQLVQTYNQLFEENPINASGVDAKAILSARLSKSRRLENLIAQLPGEKKNGLFGNLIALSLGLTPNFKSNFDLAEDAKLQLSKDTYDDDLDNLLAQIGDQYADLFLAAKNLSDAILLSDILRVNTEITKAPLSASMIKRYDEHHQDLTLLKALVRQQLPEKYKEIFFDQSKNGYAGYIDGGASQEEFYKFIKPILEKMDGTEELLVKLNREDLLRKQRTFDNGSIPHQIHLGELHAILRRQEDFYPFLKDNREKIEKILTFRIPYYVGPLARGNSRFAWMTRKSEETITPWNFEEVVDKGASAQSFIERMTNFDKNLPNEKVLPKHSLLYEYFTVYNELTKVKYVTEGMRKPAFLSGEQKKAIVDLLFKTNRKVTVKQLKEDYFKKIECFDSVEISGVEDRFNASLGTYHDLLKIIKDKDFLDNEENEDILEDIVLTLTLFEDREMIEERLKTYAHLFDDKVMKQLKRRRYTGWGRLSRKLINGIRDKQSGKTILDFLKSDGFANRNFMQLIHDDSLTFKEDIQKAQVSGQGDSLHEHIANLAGSPAIKKGILQTVKVVDELVKVMGRHKPENIVIEMARENQTTQKGQKNSRERMKRIEEGIKELGSQILKEHPVENTQLQNEKLYLYYLQNGRDMYVDQELDINRLSDYDVDAIVPQSFLKDDSIDNKVLTRSDKNRGKSDNVPSEEVVKKMKNYWRQLLNAKLITQRKFDNLTKAERGGLSELDKAGFIKRQLVETRQITKHVAQILDSRMNTKYDENDKLIREVKVITLKSKLVSDFRKDFQFYKVREINNYHHAHDAYLNAVVGTALIKKYPKLESEFVYGDYKVYDVRKMIAKSEQEIGKATAKYFFYSNIMNFFKTEITLANGEIRKRPLIETNGETGEIVWDKGRDFATVRKVLSMPQVNIVKKTEVQTGGFSKESILPKRNSDKLIARKKDWDPKKYGGFDSPTVAYSVLVVAKVEKGKSKKLKSVKELLGITIMERSSFEKNPIDFLEAKGYKEVKKDLIIKLPKYSLFELENGRKRMLASAGELQKGNELALPSKYVNFLYLASHYEKLKGSPEDNEQKQLFVEQHKHYLDEIIEQISEFSKRVILADANLDKVLSAYNKHRDKPIREQAENIIHLFTLTNLGAPAAFKYFDTTIDRKRYTSTKEVLDATLIHQSITGLYETRIDLSQLGGDSGGSSGGSSGSETPGTSESATPESSGGSSGGSSTLNIEDEYRLHETSKEPDVSLGSTWLSDFPQAWAETGGMGLAVRQAPLIIPLKATSTPVSIKQYPMSQEARLGIKPHIQRLLDQGILVPCQSPWNTPLLPVKKPGTNDYRPVQDLREVNKRVEDIHPTVPNPYNLLSGLPPSHQWYTVLDLKDAFFCLRLHPTSQPLFAFEWRDPEMGISGQLTWTRLPQGFKNSPTLFNEALHRDLADFRIQHPDLILLQYVDDLLLAATSELDCQQGTRALLQTLGNLGYRASAKKAQICQKQVKYLGYLLKEGQRWLTEARKETVMGQPTPKTPRQLREFLGKAGFCRLFIPGFAEMAAPLYPLTKPGTLFNWGPDQQKAYQEIKQALLTAPALGLPDLTKPFELFVDEKQGYAKGVLTQKLGPWRRPVAYLSKKLDPVAAGWPPCLRMVAAIAVLTKDAGKLTMGQPLVILAPHAVEALVKQPPDRWLSNARMTHYQALLLDTDRVQFGPVVALNPATLLPLPEEGLQHNCLDILAEAHGTRPDLTDQPLPDADHTWYTDGSSLLQEGQRKAGAAVTTETEVIWAKALPAGTSAQRAELIALTQALKMAEGKKLNVYTDSRYAFATAHIHGEIYRRRGWLTSEGKEIKNKDEILALLKALFLPKRLSIIHCPGHQKGHSAEARGNRMADQAARKAAITETPDTSTLLIENSSPSGGSQYKLILNGKTLKGETTTEAVDAATAEKVFKQYANDNGVDGEWTYDDATKTFTVTEKRTADGSEFEPKKKRKV

SEQ ID NO: 126 - protein, 2172 aa, synthetic construct
MKRTADGSEFESPKKKRKVDKKYSIGLDIGTNSVGWAVITDEYKVPSKKFKVLGNTDRHSIKKNLIGALLFDSGETAEATRLKRTARRRYTRRKNRICYLQEIFSNEMAKVDDSFFHRLEESFLVEEDKKHERHPIFGNIVDEVAYHEKYPTIYHLRKKLVDSTDKADLRLIYLALAHMIKFRGHFLIEGDLNPDNSDVDKLFIQLVQTYNQLFEENPINASGVDAKAILSARLSKSRRLENLIAQLPGEKKNGLFGNLIALSLGLTPNFKSNFDLAEDAKLQLSKDTYDDDLDNLLAQIGDQYADLFLAAKNLSDAILLSDILRVNTEITKAPLSASMIKRYDEHHQDLTLLKALVRQQLPEKYKEIFFDQSKNGYAGYIDGGASQEEFYKFIKPILEKMDGTEELLVKLNREDLLRKQRTFDNGSIPHQIHLGELHAILRRQEDFYPFLKDNREKIEKILTFRIPYYVGPLARGNSRFAWMTRKSEETITPWNFEEVVDKGASAQSFIERMTNFDKNLPNEKVLPKHSLLYEYFTVYNELTKVKYVTEGMRKPAFLSGEQKKAIVDLLFKTNRKVTVKQLKEDYFKKIECFDSVEISGVEDRFNASLGTYHDLLKIIKDKDFLDNEENEDILEDIVLTLTLFEDREMIEERLKTYAHLFDDKVMKQLKRRRYTGWGRLSRKLINGIRDKQSGKTILDFLKSDGFANRNFMQLIHDDSLTFKEDIQKAQVSGQGDSLHEHIANLAGSPAIKKGILQTVKVVDELVKVMGRHKPENIVIEMARENQTTQKGQKNSRERMKRIEEGIKELGSQILKEHPVENTQLQNEKLYLYYLQNGRDMYVDQELDINRLSDYDVDAIVPQSFLKDDSIDNKVLTRSDKNRGKSDNVPSEEVVKKMKNYWRQLLNAKLITQRKFDNLTKAERGGLSELDKAGFIKRQLVETRQITKHVAQILDSRMNTKYDENDKLIREVKVITLKSKLVSDFRKDFQFYKVREINNYHHAHDAYLNAVVGTALIKKYPKLESEFVYGDYKVYDVRKMIAKSEQEIGKATAKYFFYSNIMNFFKTEITLANGEIRKRPLIETNGETGEIVWDKGRDFATVRKVLSMPQVNIVKKTEVQTGGFSKESILPKRNSDKLIARKKDWDPKKYGGFDSPTVAYSVLVVAKVEKGKSKKLKSVKELLGITIMERSSFEKNPIDFLEAKGYKEVKKDLIIKLPKYSLFELENGRKRMLASAGELQKGNELALPSKYVNFLYLASHYEKLKGSPEDNEQKQLFVEQHKHYLDEIIEQISEFSKRVILADANLDKVLSAYNKHRDKPIREQAENIIHLFTLTNLGAPAAFKYFDTTIDRKRYTSTKEVLDATLIHQSITGLYETRIDLSQLGGDSGGSSGGSSGSETPGTSESATPESSGGSSGGSSTLNIEDEYRLHETSKEPDVSLGSTWLSDFPQAWAETGGMGLAVRQAPLIIPLKATSTPVSIKQYPMSQEARLGIKPHIQRLLDQGILVPCQSPWNTPLLPVKKPGTNDYRPVQDLREVNKRVEDIHPTVPNPYNLLSGLPPSHQWYTVLDLKDAFFCLRLHPTSQPLFAFEWRDPEMGISGQLTWTRLPQGFKNSPTLFNEALHRDLADFRIQHPDLILLQYVDDLLLAATSELDCQQGTRALLQTLGNLGYRASAKKAQICQKQVKYLGYLLKEGQRWLTEARKETVMGQPTPKTPRQLREFLGKAGFCRLFIPGFAEMAAPLYPLTKPGTLFNWGPDQQKAYQEIKQALLTAPALGLPDLTKPFELFVDEKQGYAKGVLTQKLGPWRRPVAYLSKKLDPVAAGWPPCLRMVAAIAVLTKDAGKLTMGQPLVILAPHAVEALVKQPPDRWLSNARMTHYQALLLDTDRVQFGPVVALNPATLLPLPEEGLQHNCLDILAEAHGTRPDLTDQPLPDADHTWYTDGSSLLQEGQRKAGAAVTTETEVIWAKALPAGTSAQRAELIALTQALKMAEGKKLNVYTDSRYAFATAHIHGEIYRRRGWLTSEGKEIKNKDEILALLKALFLPKRLSIIHCPGHQKGHSAEARGNRMADQAARKAAITETPDTSTLLIENSSPSGGSQYKLILNGKTLKGETTTEAVNAATAEKVFKQYANRNGVDGKWTYDDATKTFTVTEKRTADGSEFEPKKKRKV

SEQ ID NO: 127 - protein, 1992 aa, synthetic construct
MKRTADGSEFESPKKKRKVDKKYSIGLDIGTNSVGWAVITDEYKVPSKKFKVLGNTDRHSIKKNLIGALLFDSGETAEATRLKRTARRRYTRRKNRICYLQEIFSNEMAKVDDSFFHRLEESFLVEEDKKHERHPIFGNIVDEVAYHEKYPTIYHLRKKLVDSTDKADLRLIYLALAHMIKFRGHFLIEGDLNPDNSDVDKLFIQLVQTYNQLFEENPINASGVDAKAILSARLSKSRRLENLIAQLPGEKKNGLFGNLIALSLGLTPNFKSNFDLAEDAKLQLSKDTYDDDLDNLLAQIGDQYADLFLAAKNLSDAILLSDILRVNTEITKAPLSASMIKRYDEHHQDLTLLKALVRQQLPEKYKEIFFDQSKNGYAGYIDGGASQEEFYKFIKPILEKMDGTEELLVKLNREDLLRKQRTFDNGSIPHQIHLGELHAILRRQEDFYPFLKDNREKIEKILTFRIPYYVGPLARGNSRFAWMTRKSEETITPWNFEEVVDKGASAQSFIERMTNFDKNLPNEKVLPKHSLLYEYFTVYNELTKVKYVTEGMRKPAFLSGEQKKAIVDLLFKTNRKVTVKQLKEDYFKKIECFDSVEISGVEDRFNASLGTYHDLLKIIKDKDFLDNEENEDILEDIVLTLTLFEDREMIEERLKTYAHLFDDKVMKQLKRRRYTGWGRLSRKLINGIRDKQSGKTILDFLKSDGFANRNFMQLIHDDSLTFKEDIQKAQVSGQGDSLHEHIANLAGSPAIKKGILQTVKVVDELVKVMGRHKPENIVIEMARENQTTQKGQKNSRERMKRIEEGIKELGSQILKEHPVENTQLQNEKLYLYYLQNGRDMYVDQELDINRLSDYDVDAIVPQSFLKDDSIDNKVLTRSDKNRGKSDNVPSEEVVKKMKNYWRQLLNAKLITQRKFDNLTKAERGGLSELDKAGFIKRQLVETRQITKHVAQILDSRMNTKYDENDKLIREVKVITLKSKLVSDFRKDFQFYKVREINNYHHAHDAYLNAVVGTALIKKYPKLESEFVYGDYKVYDVRKMIAKSEQEIGKATAKYFFYSNIMNFFKTEITLANGEIRKRPLIETNGETGEIVWDKGRDFATVRKVLSMPQVNIVKKTEVQTGGFSKESILPKRNSDKLIARKKDWDPKKYGGFDSPTVAYSVLVVAKVEKGKSKKLKSVKELLGITIMERSSFEKNPIDFLEAKGYKEVKKDLIIKLPKYSLFELENGRKRMLASAGELQKGNELALPSKYVNFLYLASHYEKLKGSPEDNEQKQLFVEQHKHYLDEIIEQISEFSKRVILADANLDKVLSAYNKHRDKPIREQAENIIHLFTLTNLGAPAAFKYFDTTIDRKRYTSTKEVLDATLIHQSITGLYETRIDLSQLGGDSGGSSGGSSGSETPGTSESATPESSGGSSGGSSTLNIEDEYRLHETSKEPDVSLGSTWLSDFPQAWAETGGMGLAVRQAPLIIPLKATSTPVSIKQYPMSQEARLGIKPHIQRLLDQGILVPCQSPWNTPLLPVKKPGTNDYRPVQDLREVNKRVEDIHPTVPNPYNLLSGLPPSHQWYTVLDLKDAFFCLRLHPTSQPLFAFEWRDPEMGISGQLTWTRLPQGFKNSPTLFNEALHRDLADFRIQHPDLILLQYVDDLLLAATSELDCQQGTRALLQTLGNLGYRASAKKAQICQKQVKYLGYLLKEGQRWLTEARKETVMGQPTPKTPRQLREFLGKAGFCRLFIPGFAEMAAPLYPLTKPGTLFNWGPDQQKAYQEIKQALLTAPALGLPDLTKPFELFVDEKQGYAKGVLTQKLGPWRRPVAYLSKKLDPVAAGWPPCLRMVAAIAVLTKDAGKLTMGQPLVILAPHAVEALVKQPPDRWLSNARMTHYQALLLDTDRVQFGPVVALNPATLLPLPEEGLQHNCLDSGGSQYKLILNGKTLKGETTTEAVDAATAEKVFKQYANDNGVDGEWTYDDATKTFTVTEKRTADGSEFEPKKKRKV

SEQ ID NO: 128 - protein, 1992 aa, synthetic construct
MKRTADGSEFESPKKKRKVDKKYSIGLDIGTNSVGWAVITDEYKVPSKKFKVLGNTDRHSIKKNLIGALLFDSGETAEATRLKRTARRRYTRRKNRICYLQEIFSNEMAKVDDSFFHRLEESFLVEEDKKHERHPIFGNIVDEVAYHEKYPTIYHLRKKLVDSTDKADLRLIYLALAHMIKFRGHFLIEGDLNPDNSDVDKLFIQLVQTYNQLFEENPINASGVDAKAILSARLSKSRRLENLIAQLPGEKKNGLFGNLIALSLGLTPNFKSNFDLAEDAKLQLSKDTYDDDLDNLLAQIGDQYADLFLAAKNLSDAILLSDILRVNTEITKAPLSASMIKRYDEHHQDLTLLKALVRQQLPEKYKEIFFDQSKNGYAGYIDGGASQEEFYKFIKPILEKMDGTEELLVKLNREDLLRKQRTFDNGSIPHQIHLGELHAILRRQEDFYPFLKDNREKIEKILTFRIPYYVGPLARGNSRFAWMTRKSEETITPWNFEEVVDKGASAQSFIERMTNFDKNLPNEKVLPKHSLLYEYFTVYNELTKVKYVTEGMRKPAFLSGEQKKAIVDLLFKTNRKVTVKQLKEDYFKKIECFDSVEISGVEDRFNASLGTYHDLLKIIKDKDFLDNEENEDILEDIVLTLTLFEDREMIEERLKTYAHLFDDKVMKQLKRRRYTGWGRLSRKLINGIRDKQSGKTILDFLKSDGFANRNFMQLIHDDSLTFKEDIQKAQVSGQGDSLHEHIANLAGSPAIKKGILQTVKVVDELVKVMGRHKPENIVIEMARENQTTQKGQKNSRERMKRIEEGIKELGSQILKEHPVENTQLQNEKLYLYYLQNGRDMYVDQELDINRLSDYDVDAIVPQSFLKDDSIDNKVLTRSDKNRGKSDNVPSEEVVKKMKNYWRQLLNAKLITQRKFDNLTKAERGGLSELDKAGFIKRQLVETRQITKHVAQILDSRMNTKYDENDKLIREVKVITLKSKLVSDFRKDFQFYKVREINNYHHAHDAYLNAVVGTALIKKYPKLESEFVYGDYKVYDVRKMIAKSEQEIGKATAKYFFYSNIMNFFKTEITLANGEIRKRPLIETNGETGEIVWDKGRDFATVRKVLSMPQVNIVKKTEVQTGGFSKESILPKRNSDKLIARKKDWDPKKYGGFDSPTVAYSVLVVAKVEKGKSKKLKSVKELLGITIMERSSFEKNPIDFLEAKGYKEVKKDLIIKLPKYSLFELENGRKRMLASAGELQKGNELALPSKYVNFLYLASHYEKLKGSPEDNEQKQLFVEQHKHYLDEIIEQISEFSKRVILADANLDKVLSAYNKHRDKPIREQAENIIHLFTLTNLGAPAAFKYFDTTIDRKRYTSTKEVLDATLIHQSITGLYETRIDLSQLGGDSGGSSGGSSGSETPGTSESATPESSGGSSGGSSTLNIEDEYRLHETSKEPDVSLGSTWLSDFPQAWAETGGMGLAVRQAPLIIPLKATSTPVSIKQYPMSQEARLGIKPHIQRLLDQGILVPCQSPWNTPLLPVKKPGTNDYRPVQDLREVNKRVEDIHPTVPNPYNLLSGLPPSHQWYTVLDLKDAFFCLRLHPTSQPLFAFEWRDPEMGISGQLTWTRLPQGFKNSPTLFNEALHRDLADFRIQHPDLILLQYVDDLLLAATSELDCQQGTRALLQTLGNLGYRASAKKAQICQKQVKYLGYLLKEGQRWLTEARKETVMGQPTPKTPRQLREFLGKAGFCRLFIPGFAEMAAPLYPLTKPGTLFNWGPDQQKAYQEIKQALLTAPALGLPDLTKPFELFVDEKQGYAKGVLTQKLGPWRRPVAYLSKKLDPVAAGWPPCLRMVAAIAVLTKDAGKLTMGQPLVILAPHAVEALVKQPPDRWLSNARMTHYQALLLDTDRVQFGPVVALNPATLLPLPEEGLQHNCLDSGGSQYKLILNGKTLKGETTTEAVNAATAEKVFKQYANRNGVDGKWTYDDATKTFTVTEKRTADGSEFEPKKKRKV

SEQ ID NO: 129 - protein, 434 aa, synthetic construct
STIDVTLKEVADPIRLKLAWTKIKKKGSIGGVDGVTISSFNANLEVNLSELSNQILTNQYTPEPLQAAHIPKPGKSEKRQLGLPSLKDKIVQSSLASILSDFYEIHFSNCSYAYRPGKGSVKAIGRVRDFLNRKNYWIASVDIDNFFDSVDHEICTSILKEQISDQSIIRLISLYFSSGMIKFDQWQDTEIGIPQGGAISPVISNIYLNKLDHFLHTLNAFFVRYADDIILFSNTQQSLSETYQKTNEFLNKKLNLKLNALDNPIINVSKGFSFLGIYFHRCQLKIDFKRIDEKIEKMKYIIHKQKQIDAVIKEINEFFNGVQRHYGNIIPDSYQLKNLESTVLDELSIFLAKMKNEGHINSKKACKLVLDPLVFMSERTKSQRDAVIDKIIADAFTIVDQKKDTDEKRIEKSVDSAIHQKRQAYAKKIATETE

SEQ ID NO: 130 - protein, 361 aa, synthetic construct
MGQYQLQDAYGYCSYPRPQAAKSLLEKSLSDASLHQACQTMYPRQANFDSSDTDEEHHDAIDELLTKLYVSRERIFKREFTPSQLHSVEIEKPEGGTRLLSVPNWHDRTLQKAVTECLGNTLEHIWMKHSYGYRKGHSRLQARDQINQYIQQGYEWVLESDIESFFDSVNWLNLEQRLKLLLPNEPLVPLLMQWVSAAKQTEDEQTLARHNGLPQGAPISPILANLLLDDLDQDMIAKGHQIVRYADDFVLLFKSKAAAESALDDIITALKEHHLAINLEKTRIVEASQGFRYLGYLFGGSQYKLILNGKTLKGETTTEAVDAATAEKVFKQYANDNGVDGEWTYDDATKTFTVTEGGSKL

SEQ ID NO: 131 - protein, 391 aa, synthetic construct
MGWLYNQMAMPETIFQAWYKVASNDGRPGWDNKSIEDYSLQLEENLKALSQALLTGTYKQGPLMKLVLLKPDGKDRVLLIPGVMDRVAQTAAAIVLSPIIEAELGNCTFAYRPGISREGAAREIDRLHREGYQWVLDADIRSFFDNVRHDLLFQRLVELIDDKEMISLLHRWLTAEIVDGINPRIQNTMGLPQGCPISPALANLYLDRFDETMEKEGFKLVRFADDYLVLCKTRPKAEAALKLSETALAELKLELHSDKTRITTFAEGFKYLGYLFIRALVIPTKMHPEEWYDKLGKFKLRKKSEHALPSDPDAMTGETAKFELETDQGEKIELTKNELLQTEFGCKLLESLDKKQLSVDEFLEKVARQDEERQKEKRDALKKLYSPFLNT

SEQ ID NO: 132 - protein, 386 aa, synthetic construct
MGTANELPLLEQALSDDRLLAGWERVRANAGGPGVDGVTVEQFGGKVLRALAGLRQRVTASHYQALPLRRIEITRPGKAPRVLAVPCVADRVVQSAVALTISPRLDPGFEDFSFGYRPGRSVPRAVQHLAEARDSGLVWVAEADIQSCFDRIPWAALLQRLGEVLPDAGLLALIQHWLSLPLQWPDGHQQVRCMGVPQGSPLSPLLSNVFLDGMDKELAAGPWRVIRYADDFVIAAASREEARRGLAQAARWLRRLGLRLNLDKTRVIHFDQGFSFLGVRFRGRQMSAVQPGAEPWVLPRATQPRPHSPSSKPAQHSRSPAPTARASAPATPPSAQPEPLGPAAPSPNAAASAQPSQPRAADATLQDLQRLSVAPPNEPSPPRLRT

SEQ ID NO: 133 - protein, 330 aa, synthetic construct
STLPTPSSTDQDSPPPFWTLARLAEALEHVSARQGGAGADEQTLAEFAADAEAQLGLLALQLTQGSYRPAPARLIPVAKPGGGVRELLLPAVRDRIVQSALARYLADLLEPDFGEASHAYRPGHSVATALHRLQALRDGGLVFVAVCDIHHFFDSVDHRRLFSLLDDLPLERRLREQMKTCVRIEVADVQGQGAWSLARGLAQGSPLSPVLANLFLMAFDAACARAGLALVRYADDCVLACASETEAQSALAFAADALENIGLALNTRKSRLASFAEGFEFLGAFCGAEGMLGGRPGEAACLPPTTGPVHEAAAADDERPPSHGHRPRLR

SEQ ID NO: 134 - protein, 325 aa, synthetic construct
MLYVEQLATAWHLVQRGSRAAGIDGITVDLFTGIAREQIHQLYRQMRQERYVARPAKGFYLAKQKGGHRLIGIPTVRDRIVQRYLLQSIYPSLENAFSDAVFAYRPGLSIYAAVKRVMERYRYQPTWVIKADIQQFFDQLSWPLLLHQLDQLSLPATWVQWIEQQLKAGIVVSGQFYQPGQGVLPGSILSGALANLYLNDFDRHCLEADIPLVRYGDDCVAVCQSYLEASRSLALMQDWIEGLSLSFHPEKTTIIPPGQAFVFLGHRFRNGTVEGPARQKAEGRRQKAPQPGYGPPQLCSIVKSPRRMLATSTDDYWRDGMTTKL

SEQ ID NO: 135 - protein, 337 aa, synthetic construct
MFTQEHLHFAWLQVCAGSKTAGVDGISVELFESMATEQLQNLVYQLNNETYTASPAKGFYIPKKNGDKRLVGIPTVRDRIIQRLLLDELYFPLEGTFLDCSYAYRPGHNILQAVQHLYGYYQYQPKWIIKADVADFFDNLSWALLLTFLEKLSLEPSVLQLIEQQLQSGMIIAGQYRNFGKGVLQGGILSGALANLYLTNFDKKCLSQGINLVRYGDDFVIACNSWQEANRILDKITVWLGEVYLTLQSEKTQIFTPNDEFTFLGYRFAGGEVYAPPPPKPVLKGEWVINDSGNPYFRTKPRPKKPVSHPPKACSIDKPINFPRASLSHYWQETMTT

SEQ ID NO: 136 - protein, 325 aa, synthetic construct
ETSVRHLGELTYPLRASAAFQRQALTGEPDLLTEIAAPDSLLNAWRYVFTRDAKDGYLLQQSQQIAADPDRFVAALSGALLSGRYQPEPQVEVLIPKKGKTSAMRELSIPSIRDRVVERAVLNAIIDRADLLQCSASFAFRRGLGVQAATHEITQLRDSGNRYVLLTDIANYFGRINIADSLRVLQRGLFCSRTLALLRFIAKPRRVVGRRRIRSRGLAQGSCLSPLLANLALTDIDFALADTGVGYVRFADDILLCAPSRTELAASQRLLASLAAHQGLQLNEEKTMHTSFDAGFCYLGVDFTAHQPVTDLHYGVKHTKQPAKV

SEQ ID NO: 137 - protein, 56 aa, synthetic construct
MQYKLILNGKTLKGETTTEAVNAATAEKVFKQYANRNGVDGKWTYDDATKTFTVTE

SEQ ID NO: 138 - protein, 1368 aa, synthetic construct [sequence omitted]

SEQ ID NO: 139 - protein, 1054 aa, synthetic construct
MNQKFILGLDIGITSVGYGLIDYETKNIIDAGVRLFPEANVENNEGRRSKRGSRRLKRRRIHRLERVKKLLEDYNLLDQSQIPQSTNPYAIRVKGLSEALSKDELVIALLHIAKRRGIHKIDVIDSNDDVGNELSTKEQLNKNSKLLKDKFVCQIQLERMNEGQVRGEKNRFKTADIIKEIIQLLNVQKNFHQLDENFINKYIELVEMRREYFEGPGKGSPYGWEGDPKAWYETLMGHCTYFPDELRSVKYAYSADLFNALNDLNNLVIQRDGLSKLEYHEKYHIIENVFKQKKKPTLKQIANEINVNPEDIKGYRITKSGKPQFTEFKLYHDLKSVLFDQSILENEDVLDQIAEILTIYQDKDSIKSKLTELDILLNEEDKENIAQLTGYTGTHRLSLKCIRLVLEEQWYSSRNQMEIFTHLNIKPKKINLTAANKIPKAMIDEFILSPVVKRTFGQAINLINKIIEKYGVPEDIIIELARENNSKDKQKFINEMQKKNENTRKRINEIIGKYGNQNAKRLVEKIRLHDEQEGKCLYSLESIPLEDLLNNPNHYEVDHIIPRSVSFDNSYHNKVLVKQSENSKKSNLTPYQYFNSGKSKLSYNQFKQHILNLSKSQDRISKKKKEYLLEERDINKFEVQKEFINRNLVDTRYATRELTNYLKAYFSANNMNVKVKTINGSFTDYLRKVWKFKKERNHGYKHHAEDALIIANADFLFKENKKLKAVNSVLEKPEIESKQLDIQVDSEDNYSEMFIIPKQVQDIKDFRNFKYSHRVDKKPNRQLINDTLYSTRKKDNSTYIVQTIKDIYAKDNTTLKKQFDKSPEKFLMYQHDPRTFEKLEVIMKQYANEKNPLAKYHEETGEYLTKYSKKNNGPIVKSLKYIGNKLGSHLDVTHQFKSSTKKLVKLSIKPYRFDVYLTDKGYKFITISYLDVLKKDNYYYIPEQKYDKLKLGKAIDKNAKFIASFYKNDLIKLDGEIYKIIGVNSDTRNMIELDLPDIRYKEYCELNNIKGEPRIKKTIGKKVNSIEKLTTDVLGNVFTNTQYTKPQLLFKRGN

SEQ ID NO: 140 - skipped

SEQ ID NO: 141 - protein, 1368 aa, synthetic construct
MDKKYSIGLDIGTNSVGWAVITDEYKVPSKKFKVLGNTDRHSIKKNLIGALLFDSGETAEATRLKRTARRRYTRRKNRICYLQEIFSNEMAKVDDSFFHRLEESFLVEEDKKHERHPIFGNIVDEVAYHEKYPTIYHLRKKLVDSTDKADLRLIYLALAHMIKFRGHFLIEGDLNPDNSDVDKLFIQLVQTYNQLFEENPINASGVDAKAILSARLSKSRRLENLIAQLPGEKKNGLFGNLIALSLGLTPNFKSNFDLAEDAKLQLSKDTYDDDLDNLLAQIGDQYADLFLAAKNLSDAILLSDILRVNTEITKAPLSASMIKRYDEHHQDLTLLKALVRQQLPEKYKEIFFDQSKNGYAGYIDGGASQEEFYKFIKPILEKMDGTEELLVKLNREDLLRKQRTFDNGSIPHQIHLGELHAILRRQEDFYPFLKDNREKIEKILTFRIPYYVGPLARGNSRFAWMTRKSEETITPWNFEEVVDKGASAQSFIERMTNFDKNLPNEKVLPKHSLLYEYFTVYNELTKVKYVTEGMRKPAFLSGEQKKAIVDLLFKTNRKVTVKQLKEDYFKKIECFDSVEISGVEDRFNASLGTYHDLLKIIKDKDFLDNEENEDILEDIVLTLTLFEDREMIEERLKTYAHLFDDKVMKQLKRRRYTGWGRLSRKLINGIRDKQSGKTILDFLKSDGFANRNFMQLIHDDSLTFKEDIQKAQVSGQGDSLHEHIANLAGSPAIKKGILQTVKVVDELVKVMGRHKPENIVIEMARENQTTQKGQKNSRERMKRIEEGIKELGSQILKEHPVENTQLQNEKLYLYYLQNGRDMYVDQELDINRLSDYDVDHIVPQSFLKDDSIDNKVLTRSDKNRGKSDNVPSEEVVKKMKNYWRQLLNAKLITQRKFDNLTKAERGGLSELDKAGFIKRQLVETRQITKHVAQILDSRMNTKYDENDKLIREVKVITLKSKLVSDFRKDFQFYKVREINNYHHAHDAYLNAVVGTALIKKYPKLESEFVYGDYKVYDVRKMIAKSEQEIGKATAKYFFYSNIMNFFKTEITLANGEIRKRPLIETNGETGEIVWDKGRDFATVRKVLSMPQVNIVKKTEVQTGGFSKESIRPKRNSDKLIARKKDWDPKKYGGFVSPTVAYSVLVVAKVEKGKSKKLKSVKELLGITIMERSSFEKNPIDFLEAKGYKEVKKDLIIKLPKYSLFELENGRKRMLASARFLQKGNELALPSKYVNFLYLASHYEKLKGSPEDNEQKQLFVEQHKHYLDEIIEQISEFSKRVILADANLDKVLSAYNKHRDKPIREQAENIIHLFTLTNLGAPRAFKYFDTTIDRKVYRSTKEVLDATLIHQSITGLYETRIDLSQLGGD

SEQ ID NO: 142 - protein, 1108 aa, synthetic construct
MATRSFILKIEPNEEVKKGLWKTHEVLNHGIAYYMNILKLIRQEAIYEHHEQDPKNPKKVSKAEIQAELWDFVLKMQKCNSFTHEVDKDEVFNILRELYEELVPSSVEKKGEANQLSNKFLYPLVDPNSQSGKGTASSGRKPRWYNLKIAGDPSWEEEKKKWEEDKKKDPLAKILGKLAEYGLIPLFIPYTDSNEPIVKEIKWMEKSRNQSVRRLDKDMFIQALERFLSWESWNLKVKEEYEKVEKEYKTLEERIKEDIQALKALEQYEKERQEQLLRDTLNTNEYRLSKRGLRGWREIIQKWLKMDENEPSEKYLEVFKDYQRKHPREAGDYSVYEFLSKKENHFIWRNHPEYPYLYATFCEIDKKKKDAKQQATFTLADPINHPLWVRFEERSGSNLNKYRILTEQLHTEKLKKKLTVQLDRLIYPTESGGWEEKGKVDIVLLPSRQFYNQIFLDIEEKGKHAFTYKDESIKFPLKGTLGGARVQFDRDHLRRYPHKVESGNVGRIYFNMTVNIEPTESPVSKSLKIHRDDFPKVVNFKPKELTEWIKDSKGKKLKSGIESLEIGLRVMSIDLGQRQAAAASIFEVVDQKPDIEGKLFFPIKGTELYAVHRASFNIKLPGETLVKSREVLRKAREDNLKLMNQKLNFLRNVLHFQQFEDITEREKRVTKWISRQENSDVPLVYQDELIQIRELMYKPYKDWVAFLKQLHKRLEVEIGKEVKHWRKSLSDGRKGLYGISLKNIDEIDRTRKFLLRWSLRPTEPGEVRRLEPGQRFAIDQLNHLNALKEDRLKKMANTIIMHALGYCYDVRKKKWQAKNPACQIILFEDLSNYNPYEERSRFENSKLMKWSRREIPRQVALQGEIYGLQVGEVGAQFSSRFHAKTGSPGIRCSVVTKEKLQDNRFFKNLQREGRLTLDKIAVLKEGDLYPDKGGEKFISLSKDRKCVTTHADINAAQNLQKRFWTRTHGFYKVYCKAYQVDGQTVYIPESKDQKQKIIEEFGEGYFILKDGVYEWVNAGKLKIKKGSSKQSSSELVDSDILKDSFDLASELKGEKLMLYRDPSGNVFPSDKWMAAGVFFGKLERILISKLTNQYSISTIEDDSSKQSM

SEQ ID NO: 143 - protein, 1368 aa, synthetic construct
MDKKYSIGLDIGTNSVGWAVITDEYKVPSKKFKVLGNTDRHSIKKNLIGALLFDSGETAEATRLKRTARRRYTRRKNRICYLQEIFSNEMAKVDDSFFHRLEESFLVEEDKKHERHPIFGNIVDEVAYHEKYPTIYHLRKKLVDSTDKADLRLIYLALAHMIKFRGHFLIEGDLNPDNSDVDKLFIQLVQTYNQLFEENPINASGVDAKAILSARLSKSRRLENLIAQLPGEKKNGLFGNLIALSLGLTPNFKSNFDLAEDAKLQLSKDTYDDDLDNLLAQIGDQYADLFLAAKNLSDAILLSDILRVNTEITKAPLSASMIKRYDEHHQDLTLLKALVRQQLPEKYKEIFFDQSKNGYAGYIDGGASQEEFYKFIKPILEKMDGTEELLVKLNREDLLRKQRTFDNGSIPHQIHLGELHAILRRQEDFYPFLKDNREKIEKILTFRIPYYVGPLARGNSRFAWMTRKSEETITPWNFEEVVDKGASAQSFIERMTNFDKNLPNEKVLPKHSLLYEYFTVYNELTKVKYVTEGMRKPAFLSGEQKKAIVDLLFKTNRKVTVKQLKEDYFKKIECFDSVEISGVEDRFNASLGTYHDLLKIIKDKDFLDNEENEDILEDIVLTLTLFEDREMIEERLKTYAHLFDDKVMKQLKRRRYTGWGRLSRKLINGIRDKQSGKTILDFLKSDGFANRNFMQLIHDDSLTFKEDIQKAQVSGQGDSLHEHIANLAGSPAIKKGILQTVKVVDELVKVMGRHKPENIVIEMARENQTTQKGQKNSRERMKRIEEGIKELGSQILKEHPVENTQLQNEKLYLYYLQNGRDMYVDQELDINRLSDYDVDHIVPQSFLKDDSIDNKVLTRSDKNRGKSDNVPSEEVVKKMKNYWRQLLNAKLITQRKFDNLTKAERGGLSELDKAGFIKRQLVETRQITKHVAQILDSRMNTKYDENDKLIREVKVITLKSKLVSDFRKDFQFYKVREINNYHHAHDAYLNAVVGTALIKKYPKLESEFVYGDYKVYDVRKMIAKSEQEIGKATAKYFFYSNIMNFFKTEITLANGEIRKRPLIETNGETGEIVWDKGRDFATVRKVLSMPQVNIVKKTEVQTGGFSKESILPKRNSDKLIARKKDWDPKKYGGFVSPTVAYSVLVVAKVEKGKSKKLKSVKELLGITIMERSSFEKNPIDFLEAKGYKEVKKDLIIKLPKYSLFELENGRKRMLASARELQKGNELALPSKYVNFLYLASHYEKLKGSPEDNEQKQLFVEQHKHYLDEIIEQISEFSKRVILADANLDKVLSAYNKHRDKPIREQAENIIHLFTLTNLGAPAAFKYFDTTIDRKQYRSTKEVLDATLIHQSITGLYETRIDLSQLGGD

SEQ ID NO: 144 - protein, 1368 aa, synthetic construct
MDKKYSIGLDIGTNSVGWAVITDEYKVPSKKFKVLGNTDRHSIKKNLIGALLFDSGETAERTRLKRTARRRYTRRKNRICYLQEIFSNEMAKVDDSFFHRLEESFLVEEDKKHERHPIFGNIVDEVAYHEKYPTIYHLRKKLVDSTDKADLRLIYLALAHMIKFRGHFLIEGDLNPDNSDVDKLFIQLVQTYNQLFEENPINASGVDAKAILSARLSKSRRLENLIAQLPGEKKNGLFGNLIALSLGLTPNFKSNFDLAEDAKLQLSKDTYDDDLDNLLAQIGDQYADLFLAAKNLSDAILLSDILRVNTEITKAPLSASMIKRYDEHHQDLTLLKALVRQQLPEKYKEIFFDQSKNGYAGYIDGGASQEEFYKFIKPILEKMDGTEELLVKLNREDLLRKQRTFDNGSIPHQIHLGELHAILRRQEDFYPFLKDNREKIEKILTFRIPYYVGPLARGNSRFAWMTRKSEETITPWNFEEVVDKGASAQSFIERMTNFDKNLPNEKVLPKHSLLYEYFTVYNELTKVKYVTEGMRKPAFLSGEQKKAIVDLLFKTNRKVTVKQLKEDYFKKIECFDSVEISGVEDRFNASLGTYHDLLKIIKDKDFLDNEENEDILEDIVLTLTLFEDREMIEERLKTYAHLFDDKVMKQLKRRRYTGWGRLSRKLINGIRDKQSGKTILDFLKSDGFANRNFMQLIHDDSLTFKEDIQKAQVSGQGDSLHEHIANLAGSPAIKKGILQTVKVVDELVKVMGRHKPENIVIEMARENQTTQKGQKNSRERMKRIEEGIKELGSQILKEHPVENTQLQNEKLYLYYLQNGRDMYVDQELDINRLSDYDVDHIVPQSFLKDDSIDNKVLTRSDKNRGKSDNVPSEEVVKKMKNYWRQLLNAKLITQRKFDNLTKAERGGLSELDKAGFIKRQLVETRQITKHVAQILDSRMNTKYDENDKLIREVKVITLKSKLVSDFRKDFQFYKVREINNYHHAHDAYLNAVVGTALIKKYPKLESEFVYGDYKVYDVRKMIAKSEQEIGKATAKYFFYSNIMNFFKTEITLANGEIRKRPLIETNGETGEIVWDKGRDFATVRKVLSMPQVNIVKKTEVQTGGFSKESIRPKRNSDKLIARKKDWDPKKYGGFLWPTVAYSVLVVAKVEKGKSKKLKSVKELLGITIMERSSFEKNPIDFLEAKGYKEVKKDLIIKLPKYSLFELENGRKRMLASAKQLQKGNELALPSKYVNFLYLASHYEKLKGSPEDNEQKQLFVEQHKHYLDEIIEQISEFSKRVILADANLDKVLSAYNKHRDKPIREQAENIIHLFTLTRLGAPRAFKYFDTTIDPKQYRSTKEVLDATLIHQSITGLYETRIDLSQLGGD

SEQ ID NO: 145 - protein, 1057 aa, synthetic construct
MNQKFILGLDIGITSVGYGLIDYETKNIIDAGVRLFPEANVENNEGRRSKRGSRRLKRRRIHRLERVKLLLTEYDLINKEQIPTSNNPYQIRVKGLSEILSKDELAIALLHLAKRRGIHNVDVAADKEETASDSLSTKDQINKNAKFLESRYVCELQKERLENEGHVRGVENRFLTKDIVREAKKIIDTQMQYYPEIDETFKEKYISLVETRREYFEGPGQGSPFGWNGDLKKWYEMLMGHCTYFPQELRSVKYAYSADLFNALNDLNNLIIQRDNSEKLEYHEKYHIIENVFKQKKKPTLKQIAKEIGVNPEDIKGYRITKSGTPEFTSFKLFHDLKKVVKDHAILDDIDLLNQIAEILTIYQDKDSIVAELGQLEYLMSEADKQSISELTGYTGTHSLSLKCMNMIIDELWHSSMNQMEVFTYLNMRPKKYELKGYQRIPTDMIDDAILSPVVKRTFIQSINVINKVIEKYGIPEDIIIELARENNSDDRKKFINNLQKKNEATRKRINEIIGQTGNQNAKRIVEKIRLHDQQEGKCLYSLESIPLEDLLNNPNHYEVDHIIPRSVSFDNSYHNKVLVKQSENSKKSNLTPYQYFNSGKSKLSYNQFKQHILNLSKSQDRISKKKKEYLLEERDINKFEVQKEFINRNLVDTRYATRELTNYLKAYFSANNMNVKVKTINGSFTDYLRKVWKFKKERNHGYKHHAEDALIIANADFLFKENKKLKAVNSVLEKPEIETKQLDIQVDSEDNYSEMFIIPKQVQDIKDFRNFKYSHRVDKKPNRQLINDTLYSTRKKDNSTYIVQTIKDIYAKDNTTLKKQFDKSPEKFLMYQHDPRTFEKLEVIMKQYANEKNPLAKYHEETGEYLTKYSKKNNGPIVKSLKYIGNKLGSHLDVTHQFKSSTKKLVKLSIKNYRFDVYLTEKGYKFVTIAYLNVFKKDNYYYIPKDKYQELKEKKKIKDTDQFIASFYKNDLIKLNGDLYKIIGVNSDDRNIIELDYYDIKYKDYCEINNIKGEPRIKKTIGKKTESIEKFTTDVLGNLYLHSTEKAPQLIFKRGL

SEQ ID NO: 146 - protein, 1057 aa, synthetic construct
MNQKFILGLDIGITSVGYGLIDYETKNIIDAGVRLFPEANVENNEGRRSKRGSRRLKRRRIHRLERVKLLLTEYDLINKEQIPTSNNPYQIRVKGLSEILSKDELAIALLHLAKRRGIHNVDVAADKEETASDSLSTKDQINKNAKFLESRYVCELQKERLENEGHVRGVENRFLTKDIVREAKKIIDTQMQYYPEIDETFKEKYISLVETRREYFEGPGQGSPFGWNGDLKKWYEMLMGHCTYFPQELRSVKYAYSADLFNALNDLNNLIIQRDNSEKLEYHEKYHIIENVFKQKKKPTLKQIAKEIGVNPEDIKGYRITKSGTPEFTSFKLFHDLKKVVKDHAILDDIDLLNQIAEILTIYQDKDSIVAELGQLEYLMSEADKQSISELTGYTGTHSLSLKCMNMIIDELWHSSMNQMEVFTYLNMRPKKYELKGYQRIPTDMIDDAILSPVVKRTFIQSINVINKVIEKYGIPEDIIIELARENNSDDRKKFINNLQKKNEATRKRINEIIGQTGNQNAKRIVEKIRLHDQQEGKCLYSLESIPLEDLLNNPNHYEVDHIIPRSVSFDNSYHNKVLVKQSENSKKSNLTPYQYFNSGKSKLSYNQFKQHILNLSKSQDRISKKKKEYLLEERDINKFEVQKEFINRNLVDTRYATRELTSYLKAYFSANNMDVKVKTINGSFTNHLRKVWRFDKYRNHGYKHHAEDALIIANADFLFKENKKLQNTNKILEKPTIENNTKKVTVEKEEDYNNVFETPKLVEDIKQYRDYKFSHRVDKKPNRQLINDTLYSTRMKDEHDYIVQTITDIYGKDNTNLKKQFNKNPEKFLMYQNDPKTFEKLSIIMKQYSDEKNPLAKYYEETGEYLTKYSKKNNGPIVKKIKLLGNKVGNHLDVTNKYENSTKKLVKLSIKNYRFDVYLTEKGYKFVTIAYLNVFKKDNYYYIPKDKYQELKEKKKIKDTDQFIASFYKNDLIKLNGDLYKIIGVNSDDRNIIELDYYDIKYKDYCEINNIKGEPRIKKTIGKKTESIEKFTTDVLGNLYLHSTEKAPQLIFKRGL

SEQ ID NO: 147-197 - skipped (51 entries)

SEQ ID NO: 198 - protein, 325 aa, Phormidesmis priestleyi
SSGSRCEDWKRVRNLQRLLLKSYSNVLLAVRRVTQINAGKNTPGIDKMLVKTGPAKGKLVDLLKPQNAWQPLAARRVQIPKRNGKRRPLGIPSIIDRCLQAVVKAALEPCWEAQFEPTSYGFRPSRSVHDAIARLYVTANVNNRKKWVLEADIAGCFDTIDHDFLLQQIGHFPARRVIAQWLKAGYVENGIFHPSEAGTPQGGILSPLLANIALHGMETALGITRYAQGCVKRTVKRVLVRYADDCVVVCDSQVEAEQAQVDLQRFLKFRGLELSEEKTRIVHLSEGFDFLSFNVRHYRSQNTRTGWKLLIKPAKSGGSKRTADG

SEQ ID NO: 199 - protein, 324 aa, Turneriella parva
SSGSSGTPESKQSQPGGRKPPLMCHPAITYDAMCSLAGLQRAQISLIEELKRRGEGSKHALSYEDLTELGALLRSHQYSHRPCRLMTIKVGSKKRDIDSPDWLDRIVQRTYVDTIYPLVQQMACDSSHAYLYKRSIHTALWRLIMNIEHFGYSHVFRTDIESFFDSIPHAEMERVIDLHIRDIELNAFSHELLRVAEGFKNSKVGLPTGWLIPPLWANMLLTPVDARLESAGLKFFRYGDDYGILQRSKQEAEFAQGLLESALKPLGLHLKPGYSHKTYTRKLEDGLIVLGHEIRRINNRLTVAISKNSLAETRSGGSKRTADG

SEQ ID NO: 200 - protein, 274 aa, Alteromonadaceae bacterium
SSGSDEVSVTDRSLEQAFNAVFHDRESFNDFCTLPLAPEVSEIPLHLRKVYRPSDKLKTYLRFIDKVVLRHLKYNASVVHSYIKGSSALTAVQAHAKNQAFFLSDIKSFFPNIGDQDVRKVLMRDSHRIPILDFDQHIERVTKLMTLDGVLPVGFPTSPKLSNGFLHEFDNALAAYCDSTGLTYTRYSDDIIISGMDRAKLTVLREKVQMMLEEHASKSLRLNDEKTRVTHRGNKVKILGLVITPDGQVTIDVSRKHALEGLLHSGGSKRTADG

SEQ ID NO: 201 - protein, 269 aa, Enterococcus faecium
SSGSLRNFGLPVISSLEDFASSTRLSVSFIKYYLFQTDSHYKVFSIPKKKGGERIIAQPSRNLKAIQSWILRNILDRLSSSENSKGFEKGDSILNNALPHSGASYILSIDIEDFFPSISANKVHSVFRSLGYNSDVCKILTTFCTYKGRLPQGAPTSPKLANLVSQQLDARIQGYAGPKGIIYTRYADDLTLSSNTVKKLEKARDIIGLISKSEGLKINSLKTKLTGSRSRKSVTGLIVTKEGVGIGRAKYRELRSHIYSGGSKRTADG

SEQ ID NO: 202 - protein, 358 aa, Paeniclostridium sordellii
SSGSEIPLIYSNRKLYEYIKNNKDDFLQCDIHKESDSILTIPFTYLVRKNENEYRRLSLLHPIAQLQVANTLMKYDNLLLNYFNSNSTFSIRTPVGINDSYLNIENRHKLELEWIEKERAKDFSDEENEFVSNYFVIKKFKTITEFYKSDYVKNLELKYKNLIRIDYANCFENIYTHSLEWAYVGNKNIIKNNLHDERFSAKLDILAQRINYNETNGLVVGPEISRTLAEVVLARIDKNVYFDLKEKNIIYKRDYEVVRFIDDIMIFYNAENIGDYIKESIENYSREFKLKINSSKTKYEKRPFFREHMWISHSKKSIRSFLKYYDGSINYSGYTYDRFIEEFKELICSGGSKRTADG

SEQ ID NO: 203 - protein, 323 aa, Staphylococcus aureus
SSGSKLNKSILESYLQWYPFSKLTENSKCTILSEKFFFNFIKNGAIFKEYNTFNFPSHYSQKTSASFRNMTLVSPFVYLYIEVVGYHISKKYTRKSKYVRCYYSGDLSENEFSYKNSYDKFFADINALSSTYDNFYKFDISNFFDAVDINLLFKLINEGEEILDTRSSLIYKRLLQQIGGNKFPTLENSSTLSYLATYIYLDKVDYELEKVLQKNSKIESFQIIRYVDDLYIFFNTMESELNLVSSEIKNVVIDAYRKVKLNLNENKTKLGKSSEVNETLSVALYNHYVYKEEIDIAHFYDKNKILLFLDDLYSGGSKRTADG

SEQ ID NO: 204 - protein, 282 aa, Halomicronema hongdechloris
SSGSSRAAGIDGITVDLFTGIAREQIHQLYRQMRQERYVARPAKGFYLAKQKGGHRLIGIPTVRDRIVQRYLLQSIYPSLENAFSDAVFAYRPGLSIYAAVKRVMERYRYQPTWVIKADIQQFFDQLSWPLLLHQLDQLSLPATWVQWIEQQLKAGIVVSGQFYQPGQGVLPGSILSGALANLYLNDFDRHCLEADIPLVRYGDDCVAVCQSYLEASRSLALMQDWIEGLSLSFHPEKTTIIPPGQAFVFLGHRFRNGTVEGPARQKAEGRRSGGSKRTADG

SEQ ID NO: 205 - protein, 300 aa, Omnitrophota bacterium
SSGSVWESYKKVRANKGSSGVDGVSLQQFEEKLSDNLYKVWNRLSSGSYFPPAVKEVEIPKKDGGKRLLGIPTVGDRVAQMVVKDYLEPRLEKEFLNQSYGYLKSDKKISELSGKRRLEIEGEARISRAMCHFRLLECYGQFFDLNSEYGVVIKMSASREIEAIKRSTVKQTYDSILVDLNFGIANAPVVSPHDKFSQTLAKAHKAKVLLYMGEYADAASVALDAMGDANYKLEDTYQEIFAKGYKAREVLFSPYMVYEEKSNTWTYAGFYCPVAQIETMADNEKADEVDSGGSKRTADG

SEQ ID NO: 206 - protein, 325 aa, Fischerella sp.
SSGSATYDNFLLAWQRTVNTTSRMIRDELGMKIFAHNLQTNLEYLVQQVKAKDFPYKPLADHKVYVPKPSTTLRTMSLMAVSDVIIYQALVNIIADKAYSYLVTHENQCVLGNIYSGPGKRWMLRPWKKQYTRFVDCIENLYHAGNPWIASTDIVAFYDTIDHARLLSLIRKYCGDDQQFQELLQECLAKWAVHNSNITMGRGIPQGSNASDFLANLFLYEIDKEMIVNGYHYIRYVDDVRILASDKSTVQRGLILFDLELKRAGLVAQVTKTSVHEIEDIETEISRLRFIITAPTRNGNCLLVTLPSLPKSEQASGGSKRTADG

SEQ ID NO: 207 - protein, 308 aa, Lachnospiraceae bacterium
SSGSSGLLPLLGKREVWDEFLSYKAEKQHLSRKDARYWTKFVEEEQYRSVTDHILEPDFSLSVPVKLSVNKSNTGKKRVVYSFPEQESMVLKLLGHLLSRYDACLSPACYSFRKNITAKDAVSHILAVPGLSRKYVLKMDIRNYFNSMPVSSLLHVLKEILSDDPFLYSFLERMLTANEAYEHGRLITEERGAMAGTPTSAFFADVYLLSLDNYFAERGIPYFRYSDDILILADSPKELLSYREIAAKLIEEKGLSLNPDKLSVTPPGGAFEFLGFSIRGTDCPEKGMPAGKVDLSEASGGSKRTADG

SEQ ID NO: 208 - protein, 336 aa, Legionella sainthelensi
SSGSRCMQRITKLYNKLLRSNRIFEQDQAGINISDIYTDKKNITKILIRELLNGSYKPMQYDERKVYINSKMRLIANYSFIDRLLLSILYDLFRERTLNLISPSVYSYISGRSAKQAIQSFCSYLKQIQAPNKQINLYVLRADITNYGGSIPADTHAIFWNYFYDILEEIKDLEQRDCLRIVIEEALRPILHTEDNLPYQKIVGIPVGSPLATLIYNLYLSELDEALSDIPYGFYARYSDDFIYANTDVNQFKEGERRITAILEKLRLRCNPSKNQRFYLTHAGKPSIDSEHFIGSNRIELCGLIIFSDGTRTLKRSIIQKMLERISGGSKRTADG

SEQ ID NO: 209 - protein, 355 aa, Marinomonas mediterranea
QYQLQDAYGYCSYPRPQAAKSLLEKSLSDASLHQACQTMYPRQANFDSSDTDEEHHDAIDELLTKLYVSRERIFKREFTPSQLHSVEIEKPEGGTRLLSVPNWHDRTLQKAVTECLGNTLEHIWMKHSYGYRKGHSRLQARDQINQYIQQGYEWVLESDIESFFDSVNWLNLEQRLKLLLPNEPLVPLLMQWVSAAKQTEDEQTLARHNGLPQGAPISPILANLLLDDLDQDMIAKGHQIVRYADDFVLLFKSKAAAESALDDIITALKEHHLAINLEKTRIVEASQGFRYLGYLFVDGYAIETKREYRKEHAQLDKQLNASSLENEPSLQQEPAVQNEQSTLIGEREKLGTLKL

SEQ ID NO: 210 - protein, 392 aa, Chlorobium limicola
GWLYNQMAMPETIFQAWYKVASNDGRPGWDNKSIEDYSLQLEENLKALSQALLTGTYKQGPLMKLVLLKPDGKDRVLLIPGVMDRVAQTAAAIVLSPIIEAELGNCTFAYRPGISREGAAREIDRLHREGYQWVLDADIRSFFDNVRHDLLFQRLVELIDDKEMISLLHRWLTAEIVDGINPRIQNTMGLPQGCPISPALANLYLDRFDETMEKEGFKLVRFADDYLVLCKTRPKAEAALKLSETALAELKLELHSDKTRITTFAEGFKYLGYLFIRALVIPTKMHPEEWYDKLGKFKLRKKSEHALPSDPDAMTGETAKFELETDQGEKIELTKNELLQTEFGCKLLESLDKKQLSVDEFLEKVARQDEERQKEKRDALKKLYSPFLNTKL

SEQ ID NO: 211 - protein, 401 aa, Chryseobacterium jejuense
SSGSKWKTLKKKRRYITNYQKIDSIKNNADSLFETIRYYKEKHPNELFIINLNKFVKDIQDSILNTNFCFTSPKIIPLSKKDQSKCRPIALYNLKDRIIISLTNKYLSEYFDEHFFPESHAFRPKRIYKGKKVVTSHHHAMDSILKYKSDYKGKKLYVSECDISKFYDSVNHTIVKECFKKLISQSNLVIDSNAKRIFYKYLESYSFVHNVKIYNHKKYSDYWQQYKIDNGYFGWIDDDLKDLKYYKSVNHNRVGVPQGGAISGLIANMVLHFADLELLKKKDSKLHYVRFCDDMVIIHPNKKQCEDYYQVYNESLKKLKLVPHLPLNFNFNNKQILKEFWSEDTKSKSPYRWSGSFRNSTKWIGFVGYEVSFNNEIRVRKRSLKKEKLKQSGGSKRTADG

SEQ ID NO: 212 - protein, 346 aa, Streptococcus agalactiae
SSGSKILQVVDNVERIYREGAGDKATQMIFSDIGTPKSKEEGFDVYNELKDLLVDRGIPKEQIAFVHDANTDEKKNSLSRKVNSGEVRILMASTEKGGTGLNVQSRMKAVHHLDVPWRPSDIVQRNGRLIRQGNMHQEVDIYHYITKGSFDNYLWQTQENKLKYITQIMTSKDPVRSAEDIDEQTMTASDFKALATGNPYLKLKMELENELTVLENQKRAFNRSKDEYRHTVSYCEKHLPIMEKRLSQYDKDIAQSLATKSQDFVMRFDNQAMNNRAEAGDYLRKLITYNRSDTKEVKTLASFRGFDLKMTTRGPSEPLPETVSLMIVGDNQYTVASGGSKRTADG

SEQ ID NO: 213 - protein, 324 aa, Vibrio cidicii
SSGSMSKLKRLRSASTKPQLARVLEVDAAFLTRCLYINKTQNQYHQFSIAKKSGGTRLINAPSKELKSLQKKLSILLLDCIDEINAEKYPRSQLVKPKLRKNGDPDYAAEVLKIKISTAETKQPSLAHGFVKERSILTNAMMHVGKKNVLNIDLNDFFDCFNFGRVRGFFIKNENFKLDQHIATVIAQISCFDNKLPQGSPCSPVITNLITHSLDIRLASLAKKHKCTYTRYADDITFSTRLSEFPAQIMWHDSTTYRAGKALRKEISRSGFSINNSKTRIQYKDSRQNVTGLVVNKKPNIKQEYWRLVRAKCNSGGSKRTADG

SEQ ID NO: 214 - protein, 273 aa, Oryza sativa
AEFRTKLIELLKEFRDCFAWEYYEMPGLSRSIVEHRLPIKPGVRPHQQPPRRRKADMLEPVKAEIKRLYDAGYNQIFMAEEDIHKTAFRCPGAIGLFEWVVMTFGLKSAGAMYQRAMNYIYHDSIGWLVEVYIDDVVVKSKEIGDHIANLRKFLRFLVHERGIEVTQRSVNAIKKIQPPENKTKLQEMIGKINFVRRFISNLLGRLRHYLLSNECTVICKADVVKYMLSAPILKGRVGKWIFSLTESDLRYESPKAIKGQAVADFIVEHHDDS

SEQ ID NO: 215 - protein, 297 aa, Lachnospiraceae bacterium
SSGSIEMSIDHIVQKRGAPGYDKMQPEELPAYWAKHGERIKETIQNGSYVPRPISIHYIPKADKTKKRKLGIPCIIDRMILYAIQSVMTPYFEEEFSDRSYAFRKGKGCHDALFACLLELNRGAEYVVDLDIKSFFDKVNHTLLFELLDKKIEDPYLLLLLKKYIRTKAVCGKTFYINRIGLPQGTAISPILANMFLNSFDKHLEKMEIRFVRYADDIVIFCHNKEDAHYLLSDAESYLRYKLKLRLNQEKTKIVRPWELEYLGYSFSAASNGNMFFSLGEKTKQHMSGGSKRTADG

SEQ ID NO: 216 - protein, 212 aa, Tribolium castaneum
KYLVEVQDEVKPRGVLNIIPKQDNFRAIVSIFPDSARKPFFKLLTSKIYKVLEEKYKTSGSLYTCWSEFTQKTQGQIYGIKVDIRDAYGNVKIPVLCKLIQSIPTHLLDSEKKNFIVDHISNQFVAFRRKIYKWNHGLLQGDPLSGCLCELYMAFMDRLYFSNLDKDAFIHRTVDDYFFCSPHPHKVYDFELLIKGVYQVNPTKTRTNLPTH

SEQ ID NO: 217 - protein, 422 aa, Rosa chinensis
EFRTKLIELLKEFRDCFAWQYYEMPGLSRSIVEHRLPTEPGVRPHQQPPRRCKADMLEPVKAEIKCLYDASFIRRCRYAEWVSSIVPVIKKNGKERVCIDFRDLNKATPKDEYPMPVADQLVDAASGYKILSFMDGNVGYNQIFMAEEDIHKTAFRCPSAIGLFEWVVMTFGLKSAGATYQRAMNYIYHDLISWLVEVYIDDVVVKSKEIEDHIADLRKVFERTRKYGLKMNPTKCAFGVSAGQFLGFLVHERGIEITQRSINVIKMIKPPEDKTELQEMIGKINFVRRFISNLSGRLEPFTPLLRLKADQQSTWGAEQQKALDNIKEYLSSPPVLIPPQKGIPFWLYLSAGDKSIGSVFIQKLEGKERADVVKYMLSAPILKGRIGKWIFSLTEFDLWYESQKAIKGQAIANFIVDHRDDS

SEQ ID NO: 218 - protein, 451 aa, Brassica napus
VAVSDIRVVQEFQDVFQSLQGLPPSQSDPFTIELEPGTAPLSKAPYRMAPAEMAELKKQLKDLLGKGFIRPSTSPWGAPVLFVKKKDGSFRLCIDYRELNRVTVKNRYPLPRIDELLDQLRGATCFSKIDLTSGYHQIPIAEADVRKTAFRTRYGHFEFVVMPFGLTNAPAVFMRLMNSVFQEFLDEFVIIFIDDILVYSKSPEEQEVHLRRVMEKLREQKLFAKLSKCSFWQREMGFLGHIVSAEGVSVDPEKIEAIRDWPRPTNATEIRSFLGWAGYYRRFVKGFASMAQPMTKLTGKDVPFVWSQECEEGFVSLKEMLTSTPVLALPEHGQPYMVYTDASRVGLGCVLMQHGKVIAYASRQLMKHEGNYPTHDLEMAAVIFALKIWRSYLYGGKVQVFTDHKSLKYIFTQPELNLRQRRWMELVADYDLEIAYHPGKANVVVDALSRK

SEQ ID NO: 219 - protein, 631 aa, Staphylococcus aureus
RKLENTLESETELKRTLDKLYSKTKEHMEKKTRIKHTSLLEIAMSKPNIVTAIHSLKSNKGSMTPGVDGKTIQDYLRLSEEKLIELIRGRLTNFKAHLIKRVFIPKANGGQRPLGIPTIEDRIIQQMMKQVLEPVLEAQFFKYSFGFRPERTTYHALERVKVLVHNTGYHWIVEGDIRQFFDKVNHRILIKKLWSMGIKDRRILCLITEFLKAGIFKNIIRNDNGTPQGGILSPLLANVYLHSFDKWVAKQFEEFTTRHEYSKHDHKLRGLKSSNLKPGYLIRYADDWVLVTNNKSHAYRWKTVIKNFLQKELKLELSEEKTRITNIRHKPIEFLGFKYKVVLKGVKGKKKKDKKTRYISQITPSDKKIKRKVKELRATLTSLGKRLSHDKLSNAQLILAYNSKVRGLINYYSYATESPIMDREGYKLRKKTFNLLSRRGGVLHPINKCINLADKYPKRTQKTLAIKTEVGYIGIMHLNLTKMNENLYKQKVQNETPYSPSGRKLIERRKGTKEFSVRLDEITSLSLLEKVRKKLVNSPRYNFEYFMNRGYAFNRDRGKCRITGVPLGKHNLHVHHINPNLPLEEVNKLPNLACVDKEIHKAIHNEVDMSSILNNKEINKLKRFRNKIHAI

SEQ ID NO: 220 - protein, 329 aa, Schizosaccharomyces pombe
SSGSKLEYKKVRKLNKLLINSFYNWVVQIHQVAPEGKDNSRGDGKTLRIWNKGRVLNTKELVEWRTRAIEVWRRNQSYQPKKLKRIYIPKPDGTERPLSIPTWFDQIIQAIIGNVVECQVESIIEANDLKAYGFRKGFKTADAIQGLQGYALTGKKQKLVEFDRSKFYETIPDDKLLAVLENVDRYTRNNIEKMLKNESLDLKGIVTKPEMGTPQGGNISPILANLYASTQIMLPFKKESQSKLTMYADDGIIICDNKENPEMALAKLEAIAEKAGLKLKKDKTKIIDGDRFNFLGYEITRGKGIRLQKDMIKKCQKDGSGGSKRTADG

SEQ ID NO: 221 - protein, 277 aa, Medicago truncatula
SSGSFGIDIENATFKIVVINDKNNLSGTKKRRVIHMPSPEMRIIHKRLIRWIRGQKRLVPISASGSRPGDSVFKSVFIHKKTRKHSYVSNGYTHIDTIGWFPRHFFCLDIKDAFPSVSVSKMTEALLFAGLDPNDYSYNKVISILERYCFTKEDGLIVGANASPDLFNIYAEYFLDRNLRRYCHEHSLVYTRYLDDLIFSSNKTIGKRKRKSIYKFIDESGLKVNEKKTKIYDLRKGCAVINGIGVNEKGRMFIPRQYLDTLRGYMNSGGSKRTADG

SEQ ID NO: 222 - protein, 321 aa, Elusimicrobia bacterium
SSGSFSANHCTAEDVANLFNYLNSHGEGNVEREMLLKVIAEPEERKVLQEVKCLIDRYYPKRKKNPLEGIPKIKQFVTRFRNKERHYRSFAIPKRNGGRRIIEAPTQELANIQRLILKKILYRNQIWNSNSSVHGFVPGRNILSNASLHKEATVIVRIDLKDAFRNTKEEMLVKHLKEYFTEKGAKILVRLCTYKGHLPQGAPSSGMLLNFVLGELDGKLKKIAGFMGWRYSRYADDLTFSCVEFNKHTVGIGKLIERVKSMIKDYSYRVNEEKIRVFKKNRAMRVTGLVLNSGKPTISRKFRRNVRAKVHSGGSKRTADG

SEQ ID NO: 223 - protein, 376 aa, Schizosaccharomyces pombe
FEVELTQENYRLPIRNYPLPPGKMQAMNDEINQGLKSGIIRESKAINACPVMFVPKKEGTLRMVVDYKPLNKYVKPNIYPLPLIEQLLAKIQGSTIFTKLDLKSAYHLIRVRKGDEHKLAFRCPRGVFEYLVMPYGISTAPAHFQYFINTILGEAKESHVVCYMDDILIHSKSESEHVKHVKDVLQKLKNANLIINQAKCEFHQSQVKFIGYHISEKGFTPCQENIDKVLQWKQPKNRKELRQFLGSVNYLRKFIPKTSQLTHPLNKLLKKDVRWKWTPTQTQAIENIKQCLVSPPVLRHFDFSKKILLETDASDVAVGAVLSQKHDDDKYYPVGYYSAKMSKAQLNYSVSDKEMLAIIKSLKHWRHYLESTIEPF

SEQ ID NO: 224 - protein, 497 aa, Medicago truncatula
ELVEHRLPIKPGFRPYKQPPRHFNPLLYDRVKEEIDRLLKAGFIRPCRYAEWVSSIVSVEKKGSGKIRVCIDFRDLNKATPKDEYPMPIADMMINDASGHKNAGATYQRAMNLIFHDLLGIILEIYIDDIVVKSDGMEGHIADLRLAFERMRQYGLKMNPLKCAFGVSAGRFLGFMVHERGVEIYPKKIEKIRDFKAPICKKEVQKLLGMVNYLRRFIFNLAGKIDAFVPILHLKKEADFTWGAKQQEAFEELKRYLSTPPVVRAPKAGKPIRLYIASEDKVIGAVLTQEEDGKVYIITYLSRHLLDAETRPILSGRIGKWAYALIKYDLAYEPLKSMRGQIACDFIVDHHVDIAYEEDVCLVEVIPWKIYFDGSSCKEGQGIGVVLFSPNGMCYEASVRLEYYCTNNQAEYNALLFDLQVMEMVGAKYVEAFGDSELVVQQVAEVYKCLDGSLNRYLDSCLDIIANFDNFAIRHIARHDNSRANDLAQQASGYDVK

SEQ ID NO: 225 - protein, 312 aa, Oryza sativa
SEFRTKLIELLKEYRDCFAWEYYEMPGLSRSVVEHRLPIKPGIRPYQQPPRRCKADMLEVVKAEVKHLYDAGFIHPCRYAEWVSNIVPVIKKNGKVRVYIDDEVVISKEIEDHIADLRKVFERTRKYGLKMNPTKCAFGKLEPFTPLLRLKADQKFTWGAEQQKALDNIKKYLSSPPVLIPPQKGISFRLYLSAGDKSIGSVLIQELERKERAIFYLSRRLLDAETRYSPVEKLCLCLYFSCTKLRHYLLSNECTVICKADVVKYMLSAPILKGRVGKWIFALTEFDLRYESPKTIKGQAIADFIMDHRDDS

SEQ ID NO: 226 - protein, 504 aa, Sinorhizobium meliloti
DTDHRTDKVWVLGIQRKLYQWSKANPDDQWRDMWGWLTDLRVLRHAWQRVASNKGGRTAGVDGMTVGRIRNRSEHRFLVDLQADLRSGAYRPSPARRKLIPKAGKPGQFRPLGIPTIRDRVVQGAAKILLEPIFEAQFWHVSYGFRPGRNTHGALEYIRRAALPQKRDEDTRRNRLPYPWVIEGDIKGCFDNINHHHLLERMRKRIGDRRVVRLVGLFLKAGVLTEDQFLRTDAGTPQGGIISPLLANIALSAIEERYERWTYHRKKTQARRKSNGVAAAASARDSDRIAGRCVYLPVRYADDFVVLVSGSLEEAMAEKSALADYLIKTTGLTLLPEKTKVTAMTEGFEFLGFRFSVHWDKRYGYGPRVEIPKAKAANLRHKVKQLTQRDSISVSLGEKLRGVNAITSGWANYYRYCVGAGRVFVALDWYIGLRLYCWLHKKRPKATPSELWGSKQPSRRRATRRVWREGSVEQHVLGWTPVDRYRLAWMDMPDFAMSSGEPDA

SEQ ID NO: 227 - protein, 356 aa, Gallus gallus
SPVLAELKEQGIVIPTHSPFNSPVWPVRKPNGKWRLTIDYRRLNANTGPLTAAVPNISELIAAIQEQAHPFMATIDVKDMFFMVPLHPDDQLRFAFTWEGQQYTFTRLPQGFKHSPTLAHYALAKELEQIPLEEGVRLYQYIDDILIGGDHLTPVKIMHDKIIKRLEELGLTIPPDKIQSPAAEVKFLGIWWKGGMACIPQDTLSALDQLKMPENKKELQHALGLLVFWRKHIPDFSIIARPLYDLLRKGVSWGWTPVHEEALQLLIFEAITHQSLGPIHPSDPVQIEWGFAHSGLSIHLWQKGPEGPIRPIGFYSRSFKDAEKRYSQLEKGLFVVSLALREAERTIRQQPIILRG

SEQ ID NO: 228 - protein, 300 aa, Magneto ovumchiemensis
SSGSNVRSIMPLSKGKSLLHRTFTTANLDSSLKTLPNSSPGPDTITTDDLKKAGDQFLDKLKNNIVNGNYKQGKTKQYRIPKNDDTFRYIYVLNTTDRLVHKTIADYISPIVDNIISNSAYAYRRGLNTKGAANALNNALKEGYTSGIKADISEFFDSINISALSMMIDSLFPFEPLADFINGILENNTRDGIKGILQGSPLSPLLSNLYLTRFDSDMESKGFFKLIRYADDFVLLLKTASSYEETIKHVEDSLSTLGLKLKPEKTTEITQGKAINFLGYVITDETIAKPSGGSKRTADG

SEQ ID NO: 229 - protein, 427 aa, Desulfotomaculum copahuensis
QPLLQFPEGKVRNFQRKLYVKAKQEKTFRFYSLYDKLYREDVLQYAWQQCRANKGAPGADGQSFKDIEEKVGVERFLKEIAEELRNGTYRPMPVRRVYILKPDGSQRPLGIPTIKDRIAQMACLTVIQPIFEADFLDCSYGFRPKRNAHQAIGAITENIKQGFTAVYDADLTKCFDSIQHRLIMDSLAERITDGKVLRLIKGWLEAPIVEPGGPKQGRKNYQGTPQGGVISPLLANIVLNRLDRLWHRPGGPRERYNARLVRYADDFVVLARFIGEPIKNELESIITSMGLNLNEKKTRILDLNKGDILNFLGYSIRISRDKNRRITIKPSDKAIARLRDKIREIISRERLYHGLKGIIAEINPVLRGWKQYFKLTNVSRIFSGLNFYITARFYRVGRKTSQRYSKIFKPGVYVTLRKMGLYCLATD

SEQ ID NO: 230 - protein, 339 aa, Pseudomonas aeruginosa
WFADEPRHTRGGSRMADLYRQVRLMKTLSSAWRVVRASCMQSSSSEIRNEAIEFEADSFRQLKSIQSKLQKKKFEFLPQHGIAKKRPGKSSRPLVIAPIPNRIVQRAILDVLQDNVAYVQEILKVETSFGGIKGKNVALAIAAINKAFSNGVTHYVRSDIPSFFTKVQRAKVVDALAKNIDDVDMVNLFSAAIETTLGNLTDLQRRGLESIFPLSHDGVAQGSPLSPLIANIYLAEFDREMNREGLACIRYIDDFVIMAASEKQVMKGFRAAKAVLRRQGLQVYSPDDDPLKASKGDVRDGFDFLGCYVKPGLVQPSKFARNRLLEKIDSGGSKRTADG

SEQ ID NO: 231 - protein, 267 aa, Halomicronema hongdechloris
RAAGIDGITVDLFTGIAREQIHQLYRQMRQERYVARPAKGFYLAKQKGGHRLIGIPTVRDRIVQRYLLQSIYPSLENAFSDAVFAYRPGLSIYAAVKRVMERYRYQPTWVIKADIQQFFDQLSWPLLLHQLDQLSLPATWVQWIEQQLKAGIVVSGQFYQPGQGVLPGSILSGALANLYLNDFDRHCLEADIPLVRYGDDCVAVCQSYLEASRSLALMQDWIEGLSLSFHPEKTTIIPPGQAFVFLGHRFRNGTVEGPARQKAEGRR

SEQ ID NO: 232 - protein, 426 aa, Dorea formicigenerans
DTSNLMEQILSSDNLNRAYLQVVRNKGAEGVDGMKYTELKEHLAKNGETIKGQLRTRKYKPQPARRVEIPKPDGGVRNLGVPTVTDRFIQQAIAQVLTPIYEEQFHDHSYGFRPNRCAQQAILTALNIMNDGNDWIVDIDLEKFFDTVNHDKLMTLIGRTIKDGDVISIVRKYLVSGIMIDDEYEDSIVGTPQGGNLSPLLANIMLNELDKEMEKRGLNFVRYADDCIIMVGSEMSANRVMRNISRFIEEKLGLKVNMTKSKVDRPSGLKYLGFGFYFDPRAHQFKAKPHAKSVAKFKKRMKELTCRSWGVSNSYKVEKLNQLIRGWINYFKIGSMKTLCKELDSRIRYRLRMCIWKQWKTPQNQEKNLVKLGIDRNTARRVAYTGKRIAYVCNKGAVNVAISNKRLASFGLISMLDYYIEKCVTC

SEQ ID NO: 233 - protein, 321 aa, Catenovulum agarivorans
SSGSQLRVEIRGRRSQPIISSWVSLLESTLFTVSPSTTQLSPTHKSLSYPNYNFIDHIDADLSPHMTVRHILAADLGISVQLISRILANKTQYYRSFEIIRKNGNKRLIEAPRTYLKVLMRYINHHLLTGLAIHDSVHSYRQGKSFLTNAQIHVAKQYVFNLDIENYFGCINKRQVRELFSINDFTASAATLLSELCTFNDRLPQGAPTSPIISNAILFKIDQSMHRYCEKNNLCYTRYSDDITLSGNSRQSIVKAKSRLIAMIHGAGFKINDKKTRLMPYHKQQLVTGVVVNKEATPARNELRRIRAKFHSGGSKRTADG

SEQ ID NO: 234 - protein, 419 aa, Geobacillus sp.
ALLERILARDNLITALKRVEANQGAPGIDGVSTDQLRDYIRAHWSTIHAQLLAGTYRPAPVRRVEIPKPGGGTRQLGIPTVVDRLIQQAILQELTPIFDPDFSSSSFGFRPGRNAHDAVRQAQGYIQEGYRYVVDMDLEKFFDRVNHDILMSRVARKVKDKRVLKLIRAYLQAGVMIEGVKVQTEEGTPQGGPLSPLLANILLDDLDKELEKRGLKFCRYADDCNIYVKSLRAGQRVKQSIQRFLEKTLKLKVNEEKSAVDRPWKRAFLGFSFTPERKARIRLAPRSIQRLKQRIRQLTNPNWSISMPERIHRVNQYVMGWIGYFRLVETPSVLQTIEGWIRRRLRLCQWLQWKRVRTRIRELRALGLKETAVMEIANTRKGAWRTTKTPQLHQALGKTYWTAQGLKSLTQRYFELRQG

SEQ ID NO: 235 - protein, 338 aa, Nostoc sp.
FTQEHLHFAWLQVCAGSKTAGVDGISVELFESMATEQLQNLVYQLNNETYTASPAKGFYIPKKNGDKRLVGIPTVRDRIIQRLLLDELYFPLEGTFLDCSYAYRPGHNILQAVQHLYGYYQYQPKWIIKADVADFFDNLSWALLLTFLEKLSLEPSVLQLIEQQLQSGMIIAGQYRNFGKGVLQGGILSGALANLYLTNFDKKCLSQGINLVRYGDDFVIACNSWQEANRILDKITVWLGEVYLTLQSEKTQIFTPNDEFTFLGYRFAGGEVYAPPPPKPVLKGEWVINDSGNPYFRTKPRPKKPVSHPPKACSIDKPINFPRASLSHYWQETMTTKL

SEQ ID NO: 236 - protein, 468 aa, Alicyclobacillus macrosporangiidus
TSSRKEQGQQKTLSRGSLQEEVVNTQGTVRAQSSYPAQVRSDTCGTEYTLLDEMLKLDNMMAALKRVEQNKGAAGVDEVDVKSLRPYLKEHWFRIREELLEGTYKPQPVRRVEIPKSDGGVRLLGIPTLVDRLIQQGLAQVLTPIFDPNFSNSSYGFRPNRSTHQAVKQAKQYIEDGYRHVVDLDLEKFFDRVNHDILMARVTRKVKDKRVLKLIRAYLNAGVMANGVCVRSEQGVPQGGPLSPILSNIILDDLDKELERRGHRFVRYADDCNIYVKTVRAGQRVMEGVKRFVEDELKLKVNEQKSAVDRPWKRKFLGFSFTPERKTRTRIAPKARAKFEDKVRELTSRSRSMSMAKRIDQLNVYLRGWMGYFRLADTRSVIESLDQWTRRRLRMCYLKQWKKPKSVYRNLVKLGLSADFARRISGSGKGYWRLSNTPQMNKALGLAFWANQGLLSLVHLYDKHRSVS

SEQ ID NO: 237 - protein, 418 aa, Lysinibacillus sphaericus
LNQILARPNMIQALKRVEANKGRHGVDMMPVQTLRQHILENWESIKAQILTGTYEPQPVRRVEIPKPDGGVRLLGIPTVTDRLIQQAISQILSKEYDQTFSDNSYGFRPNRSAHDAVRKAKGYMKEGYRWVVDMDLEKFFDKVNHDRLMATLAKRIHDKSLLKLIRKYLQAGVMINGVVSSTEEGTPQGGPLSPLLSNIVLDELDKELEKRGHKFVRYADDCNIYVKSKRAGDRTIASVQRFVEGKLRLKMNESKSAVDRPWNRKFLGFSFSHHKEPKVRVAKTSLQRMKKKIREITSRKKPVPMEHRIEKLNQYLIGWCGYFALADTPSIFSRLDGWIKRRLRMCLWKNWKKPRTRVRNLIRLKVPYGKAYEWGNTRKGYWRISKSPILHRTLGNSYWGSQGLKSLQSRYESLRYSS

SEQ ID NO: 238 - protein, 417 aa, Ammonifex degensii
WEQVWERENLLAALKRVERNGGAPGIDGMTVEELRPYLREHWLEIRETLDQQSYQPSPVRRVEIDKPEGGVRLLGIPTVLDRFLQQAMAQVLTPLFEPQFSPASYGFRPGRSAHEAVKQAQEYVQAGYEWVVDIDLERYFDQVNHDMLMARVARVVADKRVLKEIRAYLKSGVMVNGVVQDTGEGTPQGGPLSPLLSNIMLDDLDKELEKRGHKFVRYADDCNVYVRTQRAGERVMESVKAYLEKKLKLKVNPKKSKVERATRVKFLGFSFYERNGEVRVRVASQSVARFRKKLRGLTKRTRSGKLEEVIETINGYLMGWMAYYRLADTPSVFAGLDSWIRRRLRQMIWKRWKRGKTRYRELVKLGVPRGRAALGAVGKSPWHMSKTPVVNEALSNAYLRNSGLKSLKARYQELRVA

SEQ ID NO: 239 - protein, 417 aa, Alkalihalobacillus halodurans
MERILSRENLIQALERVEKNKGSYGVDEMDVKSLRLHLHENWTSIRNEIIEGSYFPKPVRRVEIPKPNGGVRKLGIPTVMDRFLQQAIAQILTQLYDPTFSERSFGFRPHRRGHNAVRQAKQWMKEGYRWVVDIDLEKFFDKVNHDRLMRKLSSRIQDPRVLQLIRRYLQTGVMERGLVSPNTEGTPQGGPLSPLLSNIVLDELDNELEKRGLKFVRYADDCNIYVRSKRAGLRIMESVTSFIENRLKLKVNREKSAVDRPWNRKFLGFSFTRGKDPKMRVSKESVKRLKQRIRELTSRRHSMKMSDRLRRLNRYLTGWLGYYQVVDTPSILAQIDAWIRRRLRMIRWKEWKTTSARQKNLVRLGIKKAKAWQWANSRKGYWRVAHSPIMDYALNSEYWKGQGLMSLAERYQTRRWT

SEQ ID NO: 240 - protein, 418 aa, Virgibacillus dakarensis
LERILSRENLIQALTRVEGNKGSHGVDEMPVQNLRAHILEHWTTIRGQLEKGTYYPQPVRRVEIPKPNGGKRKLGIPTVMDRFLQQAIAQVLTDIYDPTFSQHSYGFRPKRRGHDAVREARNYIKQGYRWVVDMDLEKFFDKVNHDRLMRTLSQRINDSRVLKLIRRYLQAGVMEDGIVRPNTEGAPQGGPLSPLLSNIVLDELDKELEKRGLHFVRYADDCNIYVRSKRAGLRVMKSITKFIEGKLKLKVNEQKSAVDRPWKRKFLGFSFTVHKEKPKIRVSKESVQRFKQRIRELTSRRKSMNMKDRIEKLNRYLVGWLGYYQLADTPSIFKGLDSWIRRRLRMIRWKEWKKVKTKYKNLMKQGINKGKAWEWANTRKAYWRIANSPILHKALGDRYWSNQGLKSLYYRYQTLRWT

SEQ ID NO: 241 - protein, 432 aa, Aeribacillus pallidus
AQIEEFVHVERISMLMEMILSRENLLAALKRVEQNKGSHGVDGMSVKDLRRHLYENWDSIRQSLREGTYKPLPVRRVEIPKPNGGVRLLGIPTVTDRFIQQAIAQVLTKIFDPTFSNHSYGFRPGRRGHDAVREAKGYIKEGYRWVVDIDLEKFFDKVNHDKLMGILAKTIKDQILLKVIRRYLQSGVMINGVVMETDMGTPQGGPLSPLLSNIMLHELDKELEKRGHKFVRYADDCNIYVKTKKAGIRVMNSITNFIEKELKLKVNKEKSAVDRPWKRKFLGFSFTLNKTPKVRIANESVKRLKNKIREITSRSKPYPMEKRIEKLNKYLMGWCGYFALAETPSKFKELDEWIRRRLRMCLWKEWKTPKTRIRKLRGLGVPSHKAFEWGNTRKKYWRIACSPILHKTLDNSYWKRRGLRSLFERYQALRHT

SEQ ID NO: 242 - protein, 418 aa, Cytobacillus firmus
LMDLILSRENLIAALKRVERNKGSHGIDGMSVKSLRRHLYENWDSLCDSLRKGTYQPNPVRRIEIPKPNGGVRLLGIPTVTDRFIQQAIAQILTPLFDPSFSEHSYGFRPNRRGHDAVRKAREYISEGYRWVIDMDLEKFFDKVNHDKLMGILASRIQDRLVLKLIRKYLQAGIMINGVVYDAEEGTPQGGPLSPLLSNILLDKLDKELERRGHKFVRYADDCNIYMKSKKAGERVMNSITRFIEQKLKLKVNRGKSAVDRPWKRKFLGFSFTLNKKPKVRIANESIKRLKTKIREFTSRSKSIPMEVRIEKLNQYLTGWCGYFALADTPSKFKEFDEWIRRRLRMIEWKQWKNPRTRVRKLKGLGVPDQKAYEWGNSRRKYWRIASSPILHKTLDNSYWSNRGLKSLYQRYEFLRQT

SEQ ID NO: 243 - protein, 462 aa, Paenibacillus algicola
RSHEGQRQQKISRESLRQREAVKPSGYAGAPSSSSAQIDPSSREANNDLLERMLRGDNLRLAYKRVVQNGGAPGVDNVTVANLQAYLKTHWEAVKTELLAGTYRPMPVKRVEIPKPGGGVRLLGIPTVMDRFLQQALLQVMTPIFDADFSRHSYGFRPGKRAHDAVKQAQRYMQEGFRWVVDMDLAKFFDRVNHDMLMARVARKVTDKCVLKLIRAYLNAGVMANGVTEKTGEGTPQGGPLSPLLANILLDDLDKELTERGLRFVRYADDCNIFVASKRAGERVMDSVTRFVEGKLKLKVNREKSAVDRPWNRKFLGFSFLRDKKATIRLAPQTISRFKEKVRELTNRTRSMSMENRIAQLNRYLMGWIGYFRLASAKGHCEKFDQWIRRRLRMCLWKQWKRVRTRIRELRALGVPEWACFVMANSRRGAWEMSRNTNNALPTSYWEAKGLKSLLSRYLELC

SEQ ID NO: 244 - protein, 467 aa, Gelria sp.
SSNELHRKQKTHSRASLREIAVNTQRTAKGQSISSAQTRISPCKDQGNNLMEKVVERSNMMAALRRVEQNKGAAGIDGVKTDELRNLLWDIWTDTKEQLLTGTYRPKPVRRVEIPKPNGGVRLLGIPTVLDRLIQQALLQILTSIFDPTFSEASYGFRPGKRAHTAVRVARSYVESGYDWVIDMDIEKFFDRVNHDILMARVARKVKDKRVLKLIRRYLQAGVMLGGVVVRTEEGTPQGGPLSPLLANIYLDDLDKELEKRGHKFVRYADDCNIYVKSQRAAERVMQSIREFLQKRLKLKVNEEKSCVDRPWNLKYLGFSMFKSKGKVRICLAPETIKRVKNKIREFTSRSKPIRMEDRIRRLNAYLGGWLGYFALADTSNDFASIDGWLRRRLRMCLWRQWDRVRTRLRELRALGLPEWVAHQLANTRKGPWRMSHRPLHSALNNAYWEKQGLLSLAKRHQAICQA

SEQ ID NO: 245 - protein, 438 aa, Rhizoctonia solani
SPANRAVIDEQMDKWMKLDVIEPSKSPWAAPVFIVYRNAKPRMVIDLRKLNESVVPDEHPIPRQEEILQSLQGCKYLSSLDALAGFTQLSIHEDDREKLAFRTHRGLFQFKRMPFGYRNGPAVFQRVMQNVLSPYLWLFTLVYIDDIVIYSKTFDEHLAHVDLVLKAIMESKLTLSPDKCHFGYGSILLLGQKVSRLGLSTHKEKVQSILDLETPKNVKTLQTFLGMMVYFSSYIPFYSWIAHPLFQLLKKGTKWEWKAEHQNAFELCKEVLTEAPVRAHAMPGRPYRVYSDACDFGLAAILQQVQPVEIRDLRGTRTYDRLRKAFDKGEKVPVLAQTISKDVKDVPEDVWASDFESTTVHIERVIAYWSRVLQSAERNYSPTEREALALKEGLVKFQVYLEGEKVLAITDHAALQWSRTFQNVNRRLLSWGLVFSAF

SEQ ID NO: 246 - protein, 333 aa, Thermoanaerobacterium sp.
SSGSSYFYKERRGKIYESYYGSIVTYNTTTSKMADSKELFSSFFKARMSLKKEFPYDEIAIKLFEYNLEDNINRFSKEILKGYKFNTDFIGYKVPKNEKDDRQKVMDNIFNTIAGASFLDIIGIVIDREFSSNCCGNRLNKKLNTEYSYEYFWYGWYYKFMKKAFNKVLNKNNYYLKLDIKSFYTNINQNILYDKIIKLIPYKDSRLKEFINSLIKRHIPYVNNGKGLPQGSLTSGFLANLYLDDFDKYFISKTNDGYMRYVDDIFIFGKTEEQIKELGKEAENKLKDLYLEINKEKTSMGDKSSLKNIYYDDKELDDFQKRLSGGSKRTADG

SEQ ID NO: 247 - protein, 262 aa, Desulforapulum autotrophicum
SSGSLRINSLKHLAHRLGFAPEVLQKAASRAEKSYKFDKIPKKSGKGFREISKPNALLKNIQKAIHKLLTEIEISDNAHCGIKKRSNVTNAMNHCNKEWVYSMDFKNFFPNISHHQVYGLFRYELKCSPDVTSILTRLCTVKGGVPQGGSMSMDIANLVSRKLDTRLEGLCKIHNLSYTRHCDDLNFSGKRILDTFRAKVEIIIKESGFPLNPDKETLIPHHHPQSVVGLRVNRKKPCVPRKTRREWRKEKHSGGSKRTADG

SEQ ID NO: 248 - protein, 298 aa, Citromicrobium sp.
IPNVVWKECVELLAPQLERIFKAVYEKGMYSERWKEWTTVVLKKPGKPRYDTPKAWRPIALMNTMGKILTALLTEDLKYVTEKYSLLPNTHFGGRPGRTTTDAIQLLTSWIKGHWRKGNVVSVLFLDIEGAFPNVVVSRLAHNMRRRRVPEFIVKLIEHQLRDRRTKLKFDDYESEWVPIDNGSGQGDPKSMLEYLFYNADLIDLVAGLGEELEEGENGEDAPRGSARERGTEKRDENAAAFVDDAWLGGAGATFEEANETLKDMMNRRGGAMEWSKKHNSKFEISKLVYMGFTRRMR

SEQ ID NO: 249 - protein, 319 aa, Escherichia coli
KSAEYLNTFRLRNLGLPVMNNLHDMSKATRISVETLRLLIYTADFRYRIYTVEKKGPEKRMRTIYQPSRELKALQGWVLRNILDKLSSSPFSIGFEKHQSILNNATPHIGANFILNIDLEDFFPSLTANKVFGVFHSLGYNRLISSVLTKICCYKNLLPQGAPSSPKLANLICSKLDYRIQGYAGSRGLIYTRYADDLTLSAQSMKKVVKARDFLFSIIPSEGLVINSKKTCISGPRSQRKVTGLVISQEKVGIGREKYKEIRAKIHHIFCGKSSEIEHVRGWLSFILSVDSKSHRRLIAYISKLEKKYGKNPLNKAKT

SEQ ID NO: 250 - protein, 298 aa, Granulicella mallensis
ITPLVSFTSFAQFEQALRDSRVSAHSGASFSNSLEVDRLVKSARELYGRGLPPIVSSRTFSLLFGVSPRLISAMTKSPEKYWRTFEIKKRSGKGRNIAAPRVFLKTVQRFLLRFVLEKIPIHPNAFGFAPGKGIFKHAERHLKARFVLTLDIADFFPSISWTQVRDIFANIGFPDGVPSLLADLCTRNKVFPQGAPTSPYLSNLIFLKTDEALTEAANQFEMRYSRYADDLTFSCDSQPSDEARLAFEQIIRDAGFRIQHSKTRLRGPSQAREVTGLLVNEKIQPSRHTRRLLRAKFH

SEQ ID NO: 251 - protein, 691 aa, Arvicanthis niloticus
SLQLEEEYRLYQEREKPPEELQEWLLRFPQAWAETGGTGMARQAPPVVIELKSGATPIGVRQYPMSKEAREGIRPHIKRLLEQGILVPCRSPWNTPLLPVKKPGTNDYRPVQDLREVNKRVQDVHPTVPNPYNLLSTLPPTRTWYTVLDLKDAFFCLRLHPNSQPLFAFEWRDPESGRTGQLTWTRLPQGFKNSPTLFDEALHRDLAPFRANNPQVTLIIYIDDILLATETREDCELGTQKILAELGELGYRVSAKKAQLCRTEVTYLGYTLKNGQRWLTEARKRTVTQIPTPTTPRQVREFLGTAGFCRLWIPGFATLAAPLYPLTKEKGKFIWTKEHQVAFETLKKTLLQAPALALPDLSKPFTLYIDERKGVARGVLTQALGPWKRPVAYLSKKLDPVASGWPSCLRAIAATATLIKDADKLTLGQKVTVVAPHALENIIRQPPDRWITNARITHYQSLLLTERVTFAPPAVLNPATLLPEADETPVHQCEEILAEEAGTWSDLTDQPWPGAETWFTNGSSFVKKGKRRAGAAVVDRRTVIWASSLPEGTSAQKAELIALIQALKLAEGKSVNIYTDSRYAFATAHVHGAIYRQRGLLTSAGRDIKNKKEILDLLVAIHLPRKVAIIHCPGHQKGTGPIEKGNQMADQMAKEAAHGPMTLIAKVGSRQDERALEKRALTEEEGLEYLT

SEQ ID NO: 252 - protein, 673 aa, Gibbon ape leukemia virus
VLNLEEEYRLHEKPVPSSIDPSWLQLFPTVWAERAGMGLANQVPPVVVELRSGASPVAVRQYPMSKEAREGIRPHIQRFLDLGVLVPCQSPWNTPLLPVKKPGTNDYRPVQDLREINKRVQDIHPTVPNPYNLLSSLPPSHTWYSVLDLKDAFFCLKLHPNSQPLFAFEWRDPEKGNTGQLTWTRLPQGFKNSPTLFDEALHRDLAPFRALNPQVVLLQYVDDLLVAAPTYRDCKEGTQKLLQELSKLGYRVSAKKAQLCQKEVTYLGYLLKEGKRWLTPARKATVMKIPPPTTPRQVREFLGTAGFCRLWIPGFASLAAPLYPLTKESIPFIWTEEHQKAFDRIKEALLSAPALALPDLTKPFTLYVDERAGVARGVLTQTLGPWRRPVAYLSKKLDPVASGWPTCLKAVAAVALLLKDADKLTLGQNVTVIASHSLESIVRQPPDRWMTNARMTHYQSLLLNERVSFAPPAVLNPATLLPVESEATPVHRCSEILAEETGTRRDLKDQPLPGVPAWYTDGSSFIAEGKRRAGAAIVDGKRTVWASSLPEGTSAQKAELVALTQALRLAEGKDINIYTDSRYAFATAHIHGAIYKQRGLLTSAGKDIKNKEEILALLEAIHLPKRVAIIHCPGHQKGNDPVATGNRRADEAAKQAALSTRVLAETTKPQELI

SEQ ID NO: 253 - protein, 725 aa, Peromyscus leucopus
ALSLEEEYRLFEAEPPEKSPEELQNWLREFPQAWAETAGLGLARDQPPLMISLKASATPVSIRQYPMSREAHEGIKPHIRRLLDQGVLKPCQSPWNTPLLPVKKPGTGDYRPVQDLREVNKRVEDIHPTVPNPYNLLSTLPPTHVWYTVLDLKDAFFCLRLHPQSQLLFAFEWRDPEKGSSGQLTWTRLPQGFKNSPTLFDEALHADLAGFRVEHPTLTLLQYMDDLLLVARSRTECMEGTRALLARLGQKGYRASAKKAQVCRDKVTYLGYTLSRGQRWLTGARKETIISIPPPRNPRQVREFLGTAGYCRLWIPGFAKLAAPLYPLTKPGTMFQWEEKHQKAFQQIKKALLEAPALGLPDLTKPFELFVDENSGFAKGVLVQRLGPWRRPVAYLSKKLDPVATGWPPCLRMVAAIAVLLKDAGKLTLGQPLTVLASHAVEALVRQPPDRWLSNARMTYYQALLLDSDRVNFGPIVSLNPATLLPLPSPSEEHDCLQILAEAHGTRPDLTDQPLKDPDAVWYTDGSSFLEEGERRAGAAITTESEVVWASSLPPGTSAQRAELIALTQALRMAEGKKLTVYTDSRYAFATAHVHGEIYRRRGLLTSAGKEIKNKKEILDLLKALFLPLQLSIVHCPGHQKDDSAVARGNRLADLTARTVASQPAGSSQLMAIQEPQPERDPVPYSPEDHELAKKMGSDWEQRRQAYILGDRMVMSTSHTRYMLR

SEQ ID NO: 254 - protein, 604 aa, Nannospalax galili
TLKLEDEYKLHDDPRPTPENIDQWLAKYPEAWAETNGMGLAKQQPPLVISLKASVTPANVKQYPMTIEAQQGIRPHIKRLLEQGILIPCQSAWNTPLLPVKKPGGTDYRPVQDLREVNKRVEDIHPTVPNPYNLLSTLPPSHAWYTVLDLKDAFFCLKLHPSSQPLFAFEWKDPELGLSGQLTWTRLPQGFKNSPTLFDGALHQDLAAFRTQYPHLIILQYVDDILLAAETKEECLEGTGALLQELGQLGYRASAKKAQLCKKEVTYLGYQLKEGQRWLTKARQQTILSIPAPKDRKQVREFLGTAGFCRLWIPGFAEMAAPLYPLTKASEGFTWENEHQRAFENIKQALLTAPALGLPDLNKPFELYVDEKTGYAKGVLTQKLGPWRRPVAYLSKKLDPVASGWPPCLRMVAALAVLVKDAFKLTLGQPLCIRAPHALESLIRQPPDRWLSNTRMTHYQALLLDTDRIQFGSPVALNPATLLPSTEEPDHHDCLQILAEVFGTRPDLKDQPLDNADYTWYTDGSSFLKGSQRRAGAAVTSKDKVIWAKPLPEGTSAQKAELIALTQALRLAEGKSLNVYTDSRYAFATAHIHGEIYRRRGLDL

SEQ ID NO: 255 - protein, 680 aa, Vombatus ursinus
TCPLSEESRLLPLTFSPDRPSTTSTPTSLTLLNHFKGLVPGVWAETNPFGLAGHQPPVVVQLSSTATPACVQQYPLTRAALLGIKPHIDRLLAAGILRPCQSSWNTPLLPVRKPGSGDFRPVQDLREVNARVETVHPTVPNPYTLLSSLDPARTWYTVLDLKDAFFSIPLAPVSQPIFAFTWTDPNTGTSSQLTWTRLPQGFKNSPTLFGSALASDLAAFRVSYPEVTLLQYVDDLLLATSSEAICKDATLHLLQLLEASGYRISGKKAQLCSQSVVYLGFTLRSGQRLLSRGRVAAILGMPAPRNRRGLREFLGMAGYCRLWILGFAEVAKPLYEALTGEPTQFVWGPRQQEAFDKLRKALSSTPALSLPDLSKPFRLYVSESRAVAKGVLTQPLGPWNRPVAYLSKQLDPVASGWPSCLRTVAAIAVLVREAAKLTFGQPLEISASHHLEQLLHSPPTRWISNSRLTHYQSLLLDSARISFAPPVTLNPATLLPDSPPSSPIHDCLDTLDSIHTSRPGLTDVPLTNPDLVLFTDGSSFVQEGIRRAGAAVVTPVETLWDTALPPGTSAQRAELIALTQALRLSAGRRVNIYTDSRYAFATVHIHGYVYLQRGLLTSAGREIRNKSQIQDLLDAVWLPKEVAVIHVPAHTRGTDPQSLGNAAADKAARAAACKPLIPAM

SEQ ID NO: 256 - protein, 679 aa, Reticuloendotheliosis virus
TAPLEEEYRLFLEAPIQNVTLLEQWKREIPKVWAEINPPGLASTQAPIHVQLLSTALPVRVRQYPITLEARRSLRETIRKFRAAGILRPVHSPWNTPLLPVRKPGTSEYRMVQDLREVNKRVETIHPTVPNPYTLLSLLPPDRTWYSVLDLKDAFFCIPLAPKSQLIFAFEWTDAEEGESGQLTWTRLPQGFKNSPTLFDEALNRDLQGFRLDHPSVSLLQYVDDLLIAADTQAACLSATRDLLMTLAELGYRVSGKKAQLCQEEVTYLGFKIHKGSRTLSNSRTQAILQIPVPKTKRQVREFLGTIGYCRLWIPGFAELAQPLYAATRGGNDPLEWGEKEEEAFQSLKLALTQPPALALPSLDKPFQLFIEETGGAAKGVLTQALGPWKRPVAYLSKRLDPVAAGWPRCLRAIAAAALLTREASKLTFGQDIEITSSHNLESLLRSPPDRWLTNARITQYQVLLLDPPRVRFKQTAALNPATLLPETDDTLPIHHCLDTLDSLTSTRPDLTDQPLAQAEATLFTDGSSYIPHGKRYAGAAVVTLDSVIWAEPLPIGTSAQKAELIALTKALEWSKDKSVNIYTDSRYAFATLHVHGMIYKERGLLTAGGKAIKNAPEILALLTAVWLPKRVAVMHCRGHQKDDAPTSAGNRRADEVAREVAIRPLSIQATVFDAPDMP

SEQ ID NO: 257 - protein, 665 aa, Walleyedermal sarcoma virus
TVLLPPTYHKQLSCQTKNTLNIDEYLLQFPDQLWASLPTDIGRMLVPPITIKIKDNASLPSIRQYPLPKDKTEGLRPLISSLENQGILIKCHSPCNTPIFPIKKAGRDEYRMIHDLRAINNIVAPLTAVVASPTTVLSNLAPSLHWFTVIDLSNAFFSVPIHKDSQYLFAFTFEGHQYTWTVLPQGFIHSPTLFSQALYQSLHKIKFKISSEICIYMDDVLIASKDRDTNLKDTAVMLQHLASEGHKVSKKKLQLCQQEVVYLGQLLTPEGRKILPDRKVTVSQFQQPTTIRQIRAFLGLVGYCRHWIPEFSIHSKFLEKQLKKDTAEPFQLDDQQVEAFNKLKHAITTAPVLVVPDPAKPFQLYTSHSEHASIAVLTQKHAGRTRPIAFLSSKFDAIESGLPPCLKACASIHRSLTQADSFILGAPLIIYTTHAICTLLQRDRSQLVTASRFSKWEADLLRPELTFVACSAVSPAHLYMQSCENNIPPHDCVLLTHTISRPRPDLSDLPIPDPDMTLFSDGSYTTGRGGAAVVMHRPVTDDFIIIHQQPGGASAQTAELLALAAACHLATDKTVNIYTDSRYAYGVVHDFGHLWMHRGFVTSAGTPIKNHKEIEYLLKQIMKPKQVSVIKIEAHTKGVSMEVRGNAAADEAAKNAVFLVQRVLK

SEQ ID NO: 258 - protein, 671 aa, African green monkey simian foamy virus
TTLVPLQEYEERLLKQTMLTGSYKEKLQSLFLKYDALWQHWENQVGHRRIKPHHIATGTVNPRPQKQYPINPKAKASIQTVINDLLKQGVLIQQNSIMNTPVYPVPKPDGKWRMVLDYREVNKTIPLIAAQNQHSAGILSSIFRGKYKTTLDLSNGFWAHSITPESYWLTAFTWLGQQYCWTRLPQGFLNSPALFTADVVDLLKEVPNVQVYVDDIYISHDDPREHLEQLEKVFSLLLNAGYVVSLKKSEIAQHEVEFLGFNITKEGRGLTETFKQKLLNITPPRDLKQLQSILGLLNFARNFIPNFSELVKPLYNIIATANGKYITWTTDNSQQLQNIISMLNSAENLEERNPEVRLIMKVNTSPSAGYIRFYNEFAKRPIMYLNYVYTKAEVKFTNTEKLLTTIHKGLIKALDLGMGQEILVYSPIVSMTKIQKTPLPERKALPIRWITWMSYLEDPRIQFHYDKTLPELQQVPTVTDDIIAKIKHPSEFSMVFYTDGSAIKHPNVNKSHNAGMGIAQVQFKPEFTVINTWSIPLGDHTAQLAEVAAVEFACKKALKIDGPVLIVTDSFYVAESVNKELPYWQSNGFFNNKKKPLKHVSKWKSIADCIQLKPDIIIIHEKGHQPTASTFHTEGNNLADKLATQGSYVVNINTTPSLDAELDQLLQGQYP

SEQ ID NO: 259 - protein, 671 aa, Guenon simian foamy virus
TTLVPLQEYQERLLKQTALPEREKKILHSLFLKYDALWQHWENQVGHRRIKPHHIATGTVNPRPQKQYPINPKAKPSIQIVINDLLKQGVLIQQNSVMNTPVYPVPKPDGKWRMVLDYREVNKTIPLIAAQNQHSAGILSSIVREKYKTTLDLSNGFWAHSITPESYWLTAFTWQGKQYCWTRLPQGFLNSPALFTADVVDLLKEVPNVQAYVDDIYISHNDPKEHLEQLEKVFSLLLNAGYVVSLKKSEIAQYEVEFLGFNITKEGRGLTDTFKQKLLNITPPKDLKQLQSILGLLNFARNFIPNFSELVKPLYNIIAIANGKFIQWTEENSQQLQYIISVLNSAENLEERNPEVKLIMKVNTSPSAGYIRFYNESAKRPIMYLNYVYTKAEIKFTNTEKLLTTIHKGLIKALDLAMGQGILVYSPIVSMTKIQRTPLPERKALPIRWITWMSYLEDPRIQFHYDKTLPELQNVPMVTGDEVAKTKHPSEFSMVFYTDGSAIKHPNINKSHSAGMGIAQVQFKPEFTVLNTWSIPLGDHTAQLAEVAAVEFACKKALKINGPVLIVTDSFYVAESANKELPYWQSNGFLNNKKKPLRHISKWKSIAECIQLKPDISIIHEKGHQPTATTFHTEGNTLADKLATQGSYVVNSNTTPSLDAELDQLLQGRYP

SEQ ID NO: 260 - protein, 671 aa, Rhesus macaque simian foamy virus
TVLVPLQDYQERLLKQTTLPKEQKDQLEKLFLKYDALWQHWENQVGHRRIKPHNIATGTLAPRPQKQYPINPKAKPSIQIVIDDLLKQGVLIQQNSTMNTPVYPVPKPDGKWRMVLDYREVNKTIPLIAAQNQHSAGILSSIYRGKYKTTLDLTNGFWAHPITPESYWLTAFTWQGKQYCWTRLPQGFLNSPALFTADVVDLLKEVPNVQAYVDDIYMSHDDPQEHLEQLEKVFSILLNAGYVVSLKKSEIAQREVEFLGFNITKEGRGLTETFKQKLLNVIPPKDLKQLQSILGLLNFARNFIPNYSELVKPLYTIVANANGKFISWTEENSNQLQYIISVLNQADNLEERNPETRLILKVNSSPSAGYIRYYNEGSKRPIMYVNYVFSKAEVKFTQTEKMLTTMHKGLIKAMDLAMGQEILVYSPIVSMTKIQKTPLPERKALPVRWITWMTYLEDPRIQFHYDKTLPELQQTPSVTEDVIAKTKHPSEFAMVFYTDGSAIKHPDINKSHSAGMGIAQVQFQPEYKVIHQWSIPLGDHTAQLAEIAAVEFACKKALKISGPVLIVTDSFYVAESANKELSYWKSNGFLNNKKKPLKHVSKWKSIAECLQLKPDITIIHEKGHQQPMTTLHTEGNNLADKLATQGSYVVHCNTTPSLDAELDQLLQGHNP

SEQ ID NO: 261 - protein, 671 aa, Japanese macaque simian foamy virus
TVLVPLHEYQERLLQQTALPKEQKELLQKLFLKYDALWQHWENQVGHRRIKPHNIATGTLAPRPQKQYPINPKAKPSIQIVIDDLLKQGVLIQQNSTMNTPVYPVPKPDGKWRMVLDYREVNKTIPLIAAQNQHSAGILSSIYRGKYKTTLDLTNGFWAHPITPESYWLTAFTWQGKQYCWTRLPQGFLNSPALFTADVVDLLKEIPNVQAYVDDIYISHDDPQEHLEQLEKIFSILLNAGYVVSLKKSEIAQREVEFLGFNITKEGRGLTDTFKQKLLNITPPKDLKQLQSILGLLNFARNFIPNYSELVKPLYTIVANANGKFISWTEDNSNQLQHIISVLNQADNLEERNPETRLIIKVNSSPSAGYIRYYNEGSKRPIMYVNYIFSKAEAKFTQTEKLLTTMHKGLIKAMDLAMGQEILVYSPIVSMTKIQRTPLPERKALPVRWITWMTYLEDPRIQFHYDKSLPELQQIPNVTEDVIAKTKHPSEFAMVFYTDGSAIKHPDVNKSHSAGMGIAQVQFIPEYKIVHQWSIPLGDHTAQLAEIAAVEFACKKALKISGPVLIVTDSFYVAESANKELPYWKSNGFLNNKKKPLRHVSKWKSIAECLQLKPDIIIMHEKGHQQPMTTLHTEGNNLADKLATQGSYVVHCNTTPSLDAELDQLLQGHYP

SEQ ID NO: 262 - protein, 671 aa, Eastern chimpanzee simian foamy virus
TVLVPLQEYQERLLKHTALPKEQVKQLEKLFLKFDALWQHWENQVGHRRIKPHNIATGILTPRPQKQYPINPKAKPSIQIVIDDLLKQGVLIQQNSIMNTPVYPVPKPDGKWRMVLDYREVNKTIPLIAAQNQHSAGILSSIYRGKYKTTLDLTNGFWAHPITPESYWLTAFTWQGKQYCWTRLPQGFLNSPALFTADVVDLLKEVQNVQAYVDDIYISHDDPQEHVEQLEKVFSILLNAGYVVSLKKSEIAQREVEFLGFNITKEGRGLTDTFKQKLLNITPPKDLKQLQSILGLLNFARNFIPNYSELVKPLYTIVANANGKFITWSEENSNQLQRIISVLNQAENLEERNPETRLIIKINSSPSAGYIRYYNEGSKRPIMYVNYVFSKAEMKFTHTEKLLTTMHKGLIKAMDLAMGQEILVYSPIVSMTKIQKTPLPERKALPVRWITWMTYLEDPRIQFHYDKSLPELQQIPNVTEDVIAKTKHPSEFSMVFYTDGSAIKHPDVNKSHSAGMGIAQAQFQPEYKVLHQWSIPLGDHTAQLAEIAAVEFACKKALKVSGPVLIVTDSFYVAESANKELSYWKSNGFLNNKKKPLKHVSKWKSIAECLQLKPDIVIIHEKGHQPSMTTLHTEGNNLADKLATQGSYVVHCNTTPSLDAELDQLLQGHNP

SEQ ID NO: 263 - protein, 672 aa, Simian foamy virus
TILVPLQEYQDRILNKTALPEEQKQQLKALFTKYDNLWQHWENQVGHRKIRPHNIATGDYPPRPQKQYPINPKAKPSIQIVIDDLLKQGVLTPQNSTMNTPVYPVPKPDGRWRMVLDYREVNKTIPLTAAQNQHSAGILATIVRQKYKTTLDLANGFWAHPITPDSYWLTAFTWQGKQYCWTRLPQGFLNSPALFTADAVDLLKEVPNVQVYVDDIYLSHDNPHEHIQQLEKVFQILLQAGYVVSLKKSEIGQRTVEFLGFNITKEGRGLTDTFKTKLLNVTPPKDLKQLQSILGLLNFARNFIPNFAELVQTLYNLIASSKGKYIEWTEDNTKQLNKVIEALNTASNLEERLPDQRLVIKVNTSPSAGYVRYYNESGKKPIMYLNYVFSKAELKFSMLEKLLTTMHKALIKAMDLAMGQEILVYSPIVSMTKIQKTPLPERKALPIRWITWMTYLEDPRIQFHYDKTLPELKHIPDVYTSSIPPLKHPSQYEGVFCTDGSAIKSPDPTKSNNAGMGIVHAIYNPEYKILNQWSIPLGHHTAQMAEIAAVEFACKKALKVPGPVLVITDSFYVAESANKELPYWKSNGFVNNKKEPLKHISKWKSIAECLSIKPDITIQHEKGHQPINTSIHTEGNALADKLATQGSYVVNCNTKKPNLDAELDQLLQGNNV

SEQ ID NO: 264 - protein, 671 aa, Simian foamy virus Pongo pygmaeus pygmaeus
TVLVPLEQYKERILKETALEGQFKQQLQNILSTFDTLWQHWENQVGHRKIPPHNIATGTHPPRPQKQYPINPKAKESIQIVINDLLKQGVLIQQNSIMNTPVYPVPKPDGRWRMVLDYREVNKTIPLIAAQNQHSAGILASIYRGTYKTTLDLANGFWAHPITPNSYWLTAFTWQGKQHCWTRLPQGFLNSPALFTADVVDLMKHIPNVQVYVDDLYLSHDDPQEHLQVLQQVLHILHDAGYVVSLKKSAIAQKVVEFLGFNITKTGRGLTDAFKEKLLNISPPQNLKQLQSILGLMNFARNFIPNYAERVKPFYSLISTAKSNNILWNDELTSQLQELITLLNQADNLEERKPTTRLIIKVNSSSHAGYIRYYNEGSKKPILYINYVFSKAEEKFSMLEKLLTTLHKALIKAVDLAMGTEIMVYSPIVSMTKIQKTPLPERKALPVRWITWMTYLEDPRITFHYDKTLPELKDVPSVYQNDIPIVPHPSQYSMVFYTDGSAIKNPNPTKTHSAGMGVVQGKFNPEFQVVNQWSIPLGNHTAQLAEVAAVEFACKQALKITGPVLIITDSFYVAESANKELPYWKSNGFVNNKKKPLKHVSKWKSIADCLSLKTGITIKHEKGHQPSHTSVHTEGNALADKLATQGSYVVNNIIKPSLDAELDQVLQGNLP

SEQ ID NO: 265 - protein, 672 aa, Central chimpanzee simian foamy virus
TIRVPIEEYKERIIQQSTLPRDYKDKLRTLLEKYNILWQHWENQVGHRRIFPHNIATGTCKPKPQRQYPINPKARASIQVVIDDLLKQGVLIKQTSVMNTPVYPVPKPDGRWRMVLDYREVNKTIPLIGAQNQHSLGLLTTLVREKYKTTLDLANGFWAHPITPESYWITAFTWQGLQYCWTRLPQGFLNSPALFTADVVDLLKEIPNVQVYVDDLYISHEDPQEHLDVLDKIFQKLKDAGYVVSLKKSEIAQSTVEFLGFNITKEGRGLTESFKTKLLDLKPPETLKQLQSILGLLNFARNFVSNFSELVKPLYQLISTAKGNNISWSNENTKQLQQLISALNNADNLEERKPDVKLIVKLNASPSAGYIRFYNETGKKPIMYINYVFTKAEIKFSPLEKLLVTLHKALIKALDIAMGKEILVYSPIVSMTKIQKTPLPERKALPIRWITWMTYLEDPRISFYYDKTLPELKLVPEVQEKEKIIASRHPSQYTSVFYTDGSAIRSPDVSKAHSAGMGVVQGYFDPEFKISNSWSVPLGDHTAQYAEVCAVEFACKKALSVSGPVLIITDSFYVAESATKELPYWRSNGFLTNKKKPLKHVSKWKVIADCLQSKPDIVILHEKGHQPNNTSIHTEGNALADKLATQGSYTVNNIQNPSLDAELDQILQGNFP

SEQ ID NO: 266 - protein, 672 aa, Yellow-breasted capuchin simian foamy virus
TVKLPVQDFKKELINKANINNEEKKQLAKLLDKYDILWQQWENQVGHRKIPPHNIATGTVAPRPQRQYHINTKAKPSIQQVIDDLLKQGVLVKQTSVMNTPVYPVPKPDGKWRMVLDYRAVNKTIPLIGAQNQHSLGILTNLVRQKYKSTIDLSNGFWAHPITKDSQWITAFTWEGKQHVWTRLPQGFLNSPALFTADVVDLLKDIPGISVYVDDIYFSTETVSEHLKILEKVFKILLEAGYIVSLKKSALLRHEVTFLGFSITQTGRGLTSEFKDKIQNITPPKTLKELQSILGLFNFARNFVPNFSEIIKPLYSLISTAEGNNIKWTSEHTRHLEEIVSALNHAGNLEQRDDESPLVVKLNASPKTGYIRYYNKGGQKPIAYASHVFTNTESKFTPLEKLLVTMHKALIKAIDLALGQPIEVYSPIVSMQKLQKTPLPERKALSTRWITWLSYLEDPRIIFHYDKTLPDLKNVPETITEKQPKILPIIEYAAVFYTDGSAIRSPDKNKSHSSGMGIVQAIFKPELTIEHQWTIPLGDHTAQYAEISAVEFACKKANNISGPVLIVTDSDYVARSVNEELPFWRSNGFVNNKKKPLKHISKWKNISDSLLLKRDITIVHEPGHQPSHTSIHTQGNNLADKLATQGSYNVNSIVKNPSLDAELEQLINGHSM

SEQ ID NO: 267 - protein, 672 aa, Spider monkey simian foamy virus
TIKLPVQDLKNTLVSQANIGKEDKIKLAKLLDKYDDLWQQWDNQVGNRKITPHNIATGTYPPKPQKQYHINPKAKPSIQIVINDLLKQGVLRQSTSPMNTPVYPVPKPDGKWRMVLDYRAVNKTIPLIAAQNQHSLGILTNLIRHKYKSTIDLSNGFWAHPITEDSQWITAFTWEGKQHVWTRLPQGFLNSPALFTADVVDILKEVPGVSVYVDDIYISSPTMEEHFQVLDSIFRKLLETGYIVSLKKSALARYEVNFLGFVISETGRGLTSEFRERLQEITPPTTLKQLQSILGFLNFARNFVPNFSELVQPLYQLISTASGNFIQWTAEHTLRLNELISALNHAGNLEQRRGDSPLVVKVNASDKTGYIRYYNDNSLIPIAYASHVFSTAELKFTPLEKLLVTMHRALLKGIDLALGQPIKVYSPIASMQKLQKTPIPERKALSTRWVTWLSYLEDPRITFYYDKTLPDLKHVPASTDNNIITLLPITEYEAVFYTDGSAIKSPKTEQTHSAGMGIVMVVYTPEPNITQQWSIPLGDHTAQYAEISAVEFACKKASLLQGPVLIVTDSDYVARSANKELPFWRSNGFLNNKKKPLKHISKWKNISDSLLLKRNITIVHEPGHQPSKTSIHTLGNSLADKLAVQGSYSVNTINKIPSLDAELNQILEGNLP

SEQ ID NO: 268 - protein, 670 aa, White-tufted-ear marmoset simian foamy virus
TIKLPVQEQKDSLVSQANIKKEDKIKLAKLLDKYDALWQNWENQVGNRKITPHNIATGTEPPRPQKQYHINPKAKPSIQIVINDLLKQGVLKQVTSPMNTPVYPVPKPDGKWRMVLDYRAVNKTIPLIAAQNQHSLGILTNLVRHKYKSTIDLSNGFWAHPITSDSQWITAFTWEGKQHVWTRLPQGFLNSPALFTADVVDILKEIPNVSVYVDDIYFSSPTVEEHLDTLEKIFDKLLQAGYIVSLKKSALARYEVNFLGFAISETGRGLTSEFKERLQEITPPTTIKQLQSIMGFLNFARNFIPNFSELVQPLYQLIATASGNFIHWTTEHTLRLREIISALNHAGNLEQRVGDSPLVIKVNASDRTGYIRYYNDGSIVPIAYASHVFSSAEQKFTPTEKLLVTMHRALLKGLDLALGQPIRVYSPVASMQKLQKTPLPERKALSTRWVTWLSYLEDPRITFFYDKSLPDIKTFLPQLLLNAYMLPITQYEAVFYTDGSAIKAPKLTQAHSAGMGIVMVIFNPEPTVKQQWSIPLGDHTAQYAEISAVEFACKKASLLTGPVLIVTDSDYVARSANDELPFWRSNGFLNNKKKPLKHISKWKNISDSLLLKRNITIVHEPGHQPSKTSIHTFGNSLADKLAVQGSYTVNTVHTPSLDAELNQILNKDFP

SEQ ID NO: 269 - protein, 676 aa, Feline foamy virus
TIKLDLEEQQGTLLNNSILSKKGKEELKQLFEKYSALWQSWENQVGHRRIRPHKIATGTVKPTPQKQYHINPKAKPDIQIVINDLLKQGVLIQKESTMNTPVYPVPKPNGRWRMVLDYRAVNKVTPLIAVQNQHSYGILGSLFKGRYKTTIDLSNGFWAHPIVPEDYWITAFTWQGKQYCWTVLPQGFLNSPGLFTGDVVDLLQGIPNVEVYVDDVYISHDSEKEHLEYLDILFNRLKEAGYIISLKKSNIANSIVDFLGFQITNEGRGLTDTFKEKLENITAPTTLKQLQSILGLLNFARNFIPDFTELIAPLYALIPKSTKNYVPWQIEHSTTLETLITKLNGAEYLQGRKGDKTLIMKVNASYTTGYIRYYNEGEKKPISYVSIVFSKTELKFTELEKLLTTVHKGLLKALDLSMGQNIHVYSPIVSMQNIQKTPQTAKKALASRWLSWLSYLEDPRIRFFYDPQMPALKDLPAVDTGKDNKKHPSNFQHIFYTDGSAITSPTKEGHLNAGMGIVYFINKDGNLQKQQEWSISLGNHTAQFAEIAAFEFALKKCLPLGGNILVVTDSNYVAKAYNEELDVWASNGFVNNRKKPLKHISKWKSVADLKRLRPDVVVTHEPGHQKLDSSPHAYGNNLADQLATQASFKVHMTKNPKLDIEQIKAIQACQNNERLP

SEQ ID NO: 270 - protein, 671 aa, Guenon simian foamy virus
TTLVPLQEYQERLLKQTALPNKEKTMLQSLFLRYDALWQHWENQVGHRRIKPHHIATGTVPPRPQKQYPINPKAKPSIQVVINDLLKQGVLVQQNSTMNTPIYPVPKPDGKWRMVLDYREVNKTIPLIAAQNQHSAGILSSIFRGKYKTTLDLSNGFWAHPITPESYWLTAFTWQGQQYCWTRLPQGFLNSPALFTADVVDLLKEIPNVQAYVDDIYISHDDPVEHVQQLEKVFSLLLNAGYVVSLKKSEIAKHEVEFLGFNITKEGRGLTDTFKQKLLNITPPKDLKQLQSILGLLNFARNFIANFSELVRPLYNIVSSANGKYITWTQENSQQLQNIISTLNSAKNLQERNPEVRLVMKVNTSPSAGYIRFYNEATKQPIMYLNYVYSKAETKFTMTEKLLTTIHKGLIKALDLAMGQEILVYSPIVSMTKIQKTPLPERKALPIRWITWMSYLEDPRIQFYYDKTLPELLQVPKVTEDEIAKTKHPSEFNMVFYTDGSAIKHPNIKKSHSAGMGIAQVQFKPDFTIVNTWSIPLGDHTAQMAEIAAVEFACKKALKITGPVLVVTDSFYVAESANKELPYWQSNGFVNNKKKPLKHVSKWKSIAECLQLKPDIVIMHEKGHQPSNTTFHTEGNNLADKLATQGSYVVNTNTTPSLDAELDQLLQGHTP

SEQ ID NO: 271 - protein, 438 aa, Enterococcus faecium
IAQKAINIFEKVQVFQRKIYLSTKADNKRKFGVLYDKVYRKDILKVAWFYVKRNKGSAGIDDFTIEEIEAYGVQKFLDEIEDQLRNKKYQPKAVKRVYIPKANGKKRPLGIPTVRDRVVQTAVKIVIEPIFEADFQEFSYGFRPKRSANQAIREIYKYLNYGCEWVIDADLKGYFDTIPHDKLLLLVKERVTDKSIIKLLSLWLEAGIMEDNQVRSNILGTPQGGVISPLLANIYLNALDRYWKNNRLEGRGHDAHLIRYADDFVILCSNNPKKYYQYAKQRIDKLGLTLNEEKTRIVHATEGFDFLGYTLRKSKSHKSGKYKTYYYPSRKSMKSIKGKVKDVIQTGQHLNLPDVMERLNPMLRGWANYFKAGNSKQHFKSIDNYVIYNLTIMLRKKHKKSGKGWREHPPSWYYNYFGLVCLRKLSTNINDDSQRYGR

SEQ ID NO: 272 - protein, 38 aa, synthetic construct
AEAAKEAAKEAAKEAAKALEAEAAKEAAKEAAKEAAKA

SEQ ID NO: 273 - protein, 76 aa, synthetic construct
AEAAKEAAKEAAKEAAKALEAEAAKEAAKEAAKEAAKAAEAAKEAAKEAAKEAAKALEAEAAKEAAKEAAKEAAKA

SEQ ID NO: 274 - protein, 63 aa, synthetic construct
AGGSQYKLILNGKTLKGETTTEAVNAATAEKVFKQYANRNGVDGKWTYDDATKTFTVTEGGSA

SEQ ID NO: 275 - protein, 141 aa, synthetic construct
KLSGGGGSGGGGSGGGGSAEAWYNLGNAYYKQGDYQKAIEYYQKALELDPNNAEAWYNLGNAYYKQGDYQKAIEYYQKALELDPNNAEAWYNLGNAYYKQGDYQKAIEDYQKALELDPNNLQRSAGGGGSGGGGSGGGGAS

SEQ ID NO: 276 - protein, 63 aa, synthetic construct
AGGSQYKLILNGKTLKGETTTEAVDAATAEKVFKQYANDNGVDGEWTYDDATKTFTVTEGGSA

SEQ ID NO: 277 - protein, 46 aa, synthetic construct
AGSGNSSGSGGSGGSGNSSGSGGSPVPSTPPTPSPSTPPTPSPSAS

SEQ ID NO: 278 - protein, 47 aa, synthetic construct
AGGSSGGSSGGSSGGSSGGSSGGSSGGSSGGSSGGSSGGSSGGSSAS

SEQ ID NO: 279 - protein, 39 aa, synthetic construct
AGGSSGGSSGGSSGGSSGGSSGGSSGGSSGGSSGGSSAS

SEQ ID NO: 280 - protein, 144 aa, synthetic construct
AGSGGSGGSGGSPVPSTPPTPSPSTPPTPSPSIQRTPKIQVYSRHPAENGKSNFLNCYVSGFHPSDIEVDLLKNGERIEKVEHSDLSFSKDWSFYLLYYTEFTPTEKDEYACRVNHVTLSQPKIVKWDRDGGSGGSGGSGGSAS

SEQ ID NO: 281 - protein, 152 aa, synthetic construct
AGSGGSGGSGGSPVPSTPPTPSPSTPPTPSPSIQRTPKIQVYSRHPAENGKSNFLNCYVSGFHPSDIEVDLLKNGERIEKVEHSDLSFSKDWSFYLLYYTEFTPTEKDEYACRVNHVTLSQPKIVKWDRDPVPSTPPTPSPSTPPTPSPSAS

SEQ ID NO: 282 - protein, 74 aa, synthetic construct
AGSGGSGGSGGSPVPSTPPTNSSSTPPTPSPSPVPSTPPTNSSSTPPTPSPSPVPSTPPTNSSSTPPTPSPSAS

SEQ ID NO: 283 - protein, 66 aa, synthetic construct
AGSGGSGGSGGSPVPSTPPTPSPSTPPTPSPSGGSGNSSGSGGSPVPSTPPTPSPSTPPTPSPSAS

SEQ ID NO: 284 - protein, 74 aa, synthetic construct
AGSGGSGGSGGSPVPSTPPTPSPSTPPTPSPSPVPSTPPTNSSSTPPTPSPSPVPSTPPTPSPSTPPTPSPSAS

SEQ ID NO: 285 - protein, 74 aa, synthetic construct
AGSGGSGGSGGSPVPSTPPTPSPSTPPTPSPSPVPSTPPTPSPSTPPTPSPSPVPSTPPTPSPSTPPTPSPSAS

SEQ ID NO: 286 - protein, 121 aa, synthetic construct
AGSGGSGGSGGSPVPSTPPTPSPSTPPTPSPSQIFVKTLTGKTITLEVEPSDTIENVKAKIQDKEGIPPDQQRLIFAGKQLEDGRTLSDYNIQKESTLHLVLRLRGGGGSGGSGGSGGSAS

SEQ ID NO: 287 - protein, 52 aa, synthetic construct
AGGGSGGGGSGGGGSGGGGSGGGGSGGGGSGGGGSGGGGSGGGGSGGGGSAS

SEQ ID NO: 288 - protein, 33 aa, synthetic construct
AGGGGSGGGGSGGGGSGGGGSGGGGSGGGGSAS

SEQ ID NO: 289 - protein, 37 aa, synthetic construct
AGGGSGGGGSGGGGSGGGGSGGGGSGGGGSGGGGSAS

SEQ ID NO: 290 - protein, 42 aa, synthetic construct
AGGGSGGGGSGGGGSGGGGSGGGGSGGGGSGGGGSGGGGSAS

SEQ ID NO: 291 - protein, 47 aa, synthetic construct
AGGGSGGGGSGGGGSGGGGSGGGGSGGGGSGGGGSGGGGSGGGGSAS

SEQ ID NO: 292 - protein, 31 aa, synthetic construct
AGGSSGGSSGGSSGGSSGGSSGGSSGGSSAS

SEQ ID NO: 293 - protein, 36 aa, synthetic construct
AGSQMALHANVTGAMNYTWATCTINTHAPRSMLGSA

SEQ ID NO: 294 - protein, 43 aa, synthetic construct
GRMANFDGMDMSHKMALSSTNEIETNEGLAGTSLDVMDLSRVL

SEQ ID NO: 295 - protein, 49 aa, synthetic construct
SAAAATPAVRTVPQYKYAAGVRNPQQHLNAQPQVTMQQPAVHVQGQEPL

SEQ ID NO: 296 - protein, 50 aa, synthetic construct
VSGITGMVDPSRINVANLAEEGLGNIRANSFGYDSAAIKLRIHKLSKTLD

SEQ ID NO: 297 - protein, 51 aa, synthetic construct
ILTHDSSIRYLQEIYNSNNQKIVNLKEKVAQLEAQCQEPCKDTVQIHDITG

SEQ ID NO: 298 - protein, 57 aa, synthetic construct
KRSVKNPYPISFLLSDLINRRTQRVDGQPMIGMSSQVEEVRVYEDTEELPGDPDMIR

SEQ ID NO: 299 - protein, 58 aa, synthetic construct
CYGKKYGPKGKGKGMGAGTLSTDKGESLGIKYEEGQSHRPTNPNASRMAQKVGGSDGC

SEQ ID NO: 300 - protein, 19 aa, synthetic construct
VPSERGLQRRRFVQNALNG

SEQ ID NO: 301 - protein, 15 aa, synthetic construct
LLAPTRIYVKSVLEL

SEQ ID NO: 302 - protein, 19 aa, synthetic construct
VSPVASFNTLQLGERGNIV

SEQ ID NO: 303 - protein, 21 aa, synthetic construct
TEEPGAPLTTPPTLHGNQARA

SEQ ID NO: 304 - protein, 34 aa, synthetic construct
GYETIPLALPAFFPAPDNRGVEAPYRKEQRLGSA

SEQ ID NO: 305 - protein, 22 aa, synthetic construct
DVHNFSIKDVGTIITNKTGVSP

SEQ ID NO: 306 - protein, 21 aa, synthetic construct
GECLKCIYNTAGFYCDRCKEG

SEQ ID NO: 307 - protein, 30 aa, synthetic construct
QMALHANVTGAMNYTWATCTINTHAPRSML

SEQ ID NO: 308 - protein, 25 aa, synthetic construct
PPEATQNVAESTHNLTRNFPADLFN

SEQ ID NO: 309 - protein, 35 aa, synthetic construct
AGSVAETLKDNTQSKLTVKGNLDTYGFCDDVWTFI

SEQ ID NO: 310 - protein, 32 aa, synthetic construct
YVREEVFTNNADVVAEKALKPESDITFSKQTA

SEQ ID NO: 311 - protein, 33 aa, synthetic construct
TCHHRSPLSLTPPKCGSCHTKEIDAADPGRPNL

SEQ ID NO: 312 - protein, 34 aa, synthetic construct
LDTTAENQAKNEHLQKENERLLRDWNDVQGRFEK

SEQ ID NO: 313 - protein, 34 aa, synthetic construct
AQAERQRILERTNEGRQEAMAKGVVFGRKRKIDR

SEQ ID NO: 314 - protein, 35 aa, synthetic construct
GVTPSTTALPDIVNLSTNYLDKNTREDRIHSIKDF

SEQ ID NO: 315 - protein, 39 aa, synthetic construct
TKLPEAQQRVGGCFLNLMPQMKTLYLTYCANHPSAVNVL

SEQ ID NO: 316 - protein, 33 aa, synthetic construct
SGGSSGGSSGSETPGTSESATPESSGGSSGGSS

SEQ ID NO: 317 - protein, 85 aa, synthetic construct
GGSWCIFVYNLSPDSDESVLWQLFGPFGAVNNVKVIRDFNTNKCKGFGFVTMTNYDEAAMAIASLNGYRLGDRVLQVSFKTNGGS

SEQ ID NO: 318 - protein, 62 aa, synthetic construct
AGSKPFGKSKGFGFVCFSSPDEASKAVTEMNQRMVNGKPLYVALAQRKDVRRSQLEASIGSA

SEQ ID NO: 319 - protein, 207 aa, Aquamicrobium sp.
KKGKPIYVPNSFGEELGKKIKRKVAKKYTFDNFIYHFKDGSHVVALHRHRKNAFFCRVDISRFFYSVKRNRLKRVLKSIGISKAEHYAKWSTVKNPFDGGGYVLPYGFIQSPILATLVLAESPIGAFLRGLPETITPSVYMDDLCLSGQDEAELKVAFDGLVAAVVDAGFTLNDEKTREPAPQIDIFNCSLESGSTVVLPERIEEFF

SEQ ID NO: 320 - protein, 213 aa, Bradyrhizobium sp.
FELKYRTRGKWIFVPTDQCERKGRRIIQYFSRFKFPDYFYHYQPGGHIAALHAHLQHKLFFKIDIQNFYYSIARMRVTRALRSHAYPGANTLAKWSTVRNPYGGPLAHVLPIGFVQSPLLASLVLMKSPVAEAIERARKSGVTISVYMDDFIGSHDDEATLQAAYADIRDASVRAGLLPNPAKLVAPTAAITAFNCDLSFGAANVSIDRVAKY

SEQ ID NO: 321 - protein, 220 aa, Mesorhizobium sp.
MTVKFETYRYSYLRKGKPVFVPSERGEAIGRELKAKVEAAINFEDIYYHLREGGHVAALHAHRDHRYFARVDIERFFYGISRNRVARELHGIGIEKAGYFAKWSCVKNPFEEPRYALPYGFVQSPILATLVLTRSGVGAFLRGLPENVTASVYMDDIALSCDDAEALQATYAGLRAALEESNFAINEDKAQRPAEAIELFNCALSQRFTSVLQARRDDFF

SEQ ID NO: 322 - protein, 218 aa, Microvirga massiliensis
LENYKEKYKHEGKFIFVPNYECIRKGLRIVEFCRDRLEFPDCFYHYRNGGHVAALHRHLDNRFFFRIDLQNFYYAISRNRVCAALHASGFHKARTYGKWSCVRNPVAEDPRYSLPIGFVQSPALASLVLMRSPIMGAISAAERDSVFISVYLDDLIGSSTDFSLLERAYYTILEACGAANLQVNARKLLPPASEIHAFNCVLKHGLAEVTDERIRKFV

SEQ ID NO: 323 - protein, 229 aa, Sphingorhabdus pulchriflava
MTVAIRNYSFKYDRRGKPVFAPSNVGRRIGNEVKEAVEGAFAFSPLYFHFRAGGHVAAIHHHRPHRFFARIDISRFFYSISRRRVQSALDRIGVANAAFYAKWSTVTNPFEAPRYALPYGFVQSPILASLVLASSSVGEHLSSLSPDVTVSVYVDDISLSADRLDALQAAYDATLAVLESDGFLVSADKLRPPAAAIDVFNCDLAQGLSKVQDDRINQFMADLPSHEAE

SEQ ID NO: 324 - protein, 229 aa, Sphingomonas sp.
MPVQFQNFDYTYQRNGKPVFAPSPLGRQIGEDIKEQVEAKYQFDDFVFHLRKKGGHVAALHSHRPHGYFARVDIRRFFYSVARNRVQRALATIGIPRARHYAKWSCVKNPYDLPTYSLPYGFVQSPILASLVLMESAVGSFLRGLVAENHVTVSVYMDDISLSSDDLPRLQAAFNRLVHDLAEARFQVSPAKLRPPGPVMDLFNCDLRQGETVVREERIDLFEAEPQSH

SEQ ID NO: 325 - protein, 243 aa, Tsuneonella flava
YDHHFALKPGTRVYIPTEMGRKRGTEIKGAIEGLWKPPANYFHLLEGGHVAAVKSHRNATWLASLDLQRFFDQITRTKIHRALKVIGLPHQDAWEMACDSTVDKKPPKRHFSLPFGFVQSPIVASVVLAQSALGGAIRNLVAGGLTVTVYVDDITISGSSEEQVFAAVEQLETGAELAGLAFNPEKTQLPNGAVTSFNIAFGSGALEVKEDRMAEFEVAIRNGNEYQIEGILGYVGSVNHGQA

SEQ ID NO: 326 - protein, 246 aa, Burkholderia lessedis
KWLHKFERKPGRWVFEPSPEARAEGVEVKELVESHWKAPSYYFHLRQGGHVAALMRHQRSTCFVKVDIADFFGSVSRSRISRVLKEFVSHAEARRIATASTVQHPEDPARQILPYGFVQSPLLASLALHKSGLGKYLDQLHRENSVVVTVYVDDIIVSGNDPEELGDVLTTMKTKAQRSRLAFSDDKEQGPAATISAFNIELAAGTPLSVLPPKLAEFREAFQASTSELQRAGIQGYVRSVNPVQA

SEQ ID NO: 327 - protein, 250 aa, Stenotrophomonas maltophilia
MKRWEHRFQVKSGRWVFVPTPASRAVGEQIRARVAKAWSPPAFYYHLRKGGHVAALRAHADSTYFFRCDLKNFFGSINLSRVTRCLKRYFSYVEARGMASASVVIAPGATKTMLPYGFVQSPLLASLALDQSRAGAYLRKLSAQEGITVSVYMDDIVVSSLEIGLLDKIKAELGEKAEKAGISLNQEKTEGPSTLVTVFNVELSHNSLVISEERMAEFREALMIASCDAVAMGILGYVASVNDAQLSKLY

SEQ ID NO: 328 - protein, 244 aa, Roseovarius sp.
MRNFNHKIDLGNGKWAYVQEKHLIPHARRMTNLIIERARFPKFYFHFHSGGHVMASKLHSENSFFSHIDLERFFYHVSKNKIVRSMKKVGFGFREAEGFAVVSTVRSEKGFTLPFGFVQSPALAALVLDQSQLGKTLREIAPNVQTTLYGDDILLSSKNEKTLREASDNVLLACQKANFPTNQEKTKVVQTKITAFNINISRNCLEITEERMNDFYVNIRHLGNCPTTQGILGYVSRVNQRQAE

SEQ ID NO: 329 - protein, 249 aa, Pseudomonas lurida
KWLSRFRLKSNTWVYVPTFETVKEGKLFKKAIEFKWIPPTNYYHLRSGGHVEAVKYHLGGKFFVHADISKFFNSINRSRITRELKPYFGYERSRAIAMESTVSIPVDSGQIFALPFGFVQSTIIASLCLRKSSLGKTIDVLNKTDGIRVSVYVDDIVVSTQCLEKAKAAFLMIQKSAERSGFLLNKEKSQGPSDKITAFNIDLRQNFMEVTSWRFSELLSSYKDATSDKKKSGIWGYVNSVNSAQASML

SEQ ID NO: 330 - protein, 248 aa, Vibrio genomosp. F6
WSNRFEIKPGRWVYNPTKESRLIGQKIIKLLNKSWKKPPYYYHLRCGGHVEALAIHLENQFFATVDISDFFGHISRSRITRALKPIVGYEVARKIAKLSTIKTTENYTHSHHLPYGFNQSPILASICLFNSTLGKYLETAANDENITVSVYMDDIVISSQNEELLTQTFDQIFFTAKKSKFVINENKTKPVAKQTEAFNIVITHGDMKIEYDRLVKFQHAYSGSNSEHQRHGIGSYVGSVNKAQAKLL

SEQ ID NO: 331 - protein, 250 aa, Vibrio parahaemolyticus
WKNRFEVKPGTWVYEPTLESKKYGRELITQIRKKWKAPEYYYHLRDGGHVKALEKHTANNFFASLDIKDFFGSISRTRVTRTLKPLFGYDIARKLAKLSSVKNDGSKAHSHSIPYGYVQSPILASICLHKSTFGSELDSCFNDQNVTISVYVDDIVISSNDKKLLKHWCERLKNAAKRSKFTLNALKESPADSTVVAFNIEVTHNSMVITKERFKLLYEAYQNSQSIMQRKGIGGYVGTVNKSQARLLDL

SEQ ID NO: 332 - protein, 252 aa, Ewingella americana
MDKWIHKFEIKEGRWVYVPSEKTREIGGKIHFYIKHKWNYPLYMYHLRKGGHVAAANRHIKKQYFSLIDISDFFGSTSQSRVTRELGKLIPYAKAREIAKLSTVRSPPSNGLKHVIPYGYPQSPILATLCFHQSFCGKLINIISKSGQISVSIYMDDILLSSDDLSQLEIAFNSVKAALAKSGYCINERKTQSPSTMVKVFNLELSQQSLRVSPKRIVEFLQAYISSKNAAERKGIASYVGSVNKSQSTIFK

SEQ ID NO: 333 - protein, 253 aa, Enterobacter cloacae
MKPTWLHKFEVKENRWVYIPDAETHHLGQKIHTYIKHKWKSPLYMFHLREGGHVAAANYHIKKKYFSLIDISNFFGATSQSRVTRELGRLIPYVKAREIARLSTVKNLNGNGLKHVIPYGYPQSPILASLCFHQSFCGSTINTVSKSGHVSVSIFMDDILLSSDDLGQLENAFDIILEAIRRSGYTVNENKTQPPSLMVNVFNLELSQNSLRVTSKRIVEFLQAFISSKNPHERKGIASYVGSINTAQAKLFR

SEQ ID NO: 334 - protein, 250 aa, Nitrosomonas halophila
ERWNSKFQIKKGAWVFIPTKETIDNGLQIKKLIEKHWSFPKYYFHLIKGGHVRALHEHKKHKFFIHLDIKNFFGQINRSRVTRSLKEYVSYEKAREIAVESTVRLPESTEVKYILPFGFVQSPIIASICLSKSALGRHLTSLKQQNEYAVSIYMDDILVSANNSEKLMMEIMRIKAASEKSKLLLNAAKQVGPDTRIKAFNIEISQDLLQITPSKLQELANTYATSENDHQRAGIFNYVLSVNPSQVEAF

SEQ ID NO: 335 - protein, 255 aa, Kalamiella piersonii
MNTENEWLHKFEIKPGRWVYIPNEATLKQGKLIHAYIRSKWKSPLYMFHLREGGHVAAANHHVQKKYFALIDIQDFFGATSQSRITRALGNFIPYDKARKIAKLSTVKNQNGNGLKHVIPYGYPQSPILASFCFHQSFCGDLIKNISKSGDISVSIYMDDILLSGNDLGRLEDTFKAVNEALVKSGYTVNRSKTQLPSTIVNVFNLELSQNSLRISAKRIVDFLQTYISSSHPPEKKGIASYVGSVNKEQARLFK

SEQ ID NO: 336 - protein, 251 aa, Polynucleobacter sp.
MTYEAKWINKFLLKPKKWVFVPSKQSKIIGKNICRLLRKHWDPPEYFYHLRNGGHVEALRAHEQNQYFSRLDIDNFFGSITRSRITRSLKKFVSYKTAWDIAHQSTVKDPDCISMRFMLPFGFIQSPLLASICLDQSFLGEFLKLLNKNPQLSLSVYMDDLVISSNDRDLLLSISADLKNAIVKSHWSSNEQKEDICKQLIMAFNIEISHQSTRISDPRMQEFKYSYKHAANSNSKLGIVNYIRSVNPVQG

SEQ ID NO: 337 - protein, 255 aa, Serratia plymuthica
MSTPSDWLHKFEIKAERWVFVPSKETLKRGQKIHAYIKQKWKYPRYMFHLRNGGHVAAANFHLKSNYFSLIDVSDFYGTTSQSRVTRELGRLVPYVKAREIARLSTVVNPNRNGFKHVIPYGYPQSPILASLCFHHSFCGGVISSISKSERVFVSVYMDDILLSSDDMNLLVEAFDTVRQALRKSGYTLNENKTQPPSPKIQVFNLELGHNHLRVTPKRIVEFLKVFTSSSNEHERKGIASYVGSINKSQAKLFR

SEQ ID NO: 338 - protein, 254 aa, Cronobacter universalis
MEKWKHKFLLKENKWVHIPSEEMIKYGSALHRYIRKNWRFPLYYYHLRNGGHVAAARLHKRNNYFCLIDIKGFFESTSQSRVTRELKKIIPYDKARLIAKLSTVRLPNAVGHKFAVPYGYPQSPVLATLCLQNSYAGNVIDSFHRSGCVTVSVYMDDIILSCKSLVTLNQHFDVLCKALRKSRYELNASKTQSPAAKISVFNLELGHQHLKVESERMMLFIQAFAKSGNEHERKSIAKYVNTVNASQARHHFPK

SEQ ID NO: 339 - protein, 257 aa, Escherichia coli
MTIEVQRWEDKFEIKPGVWVYIPSVEARKVGGKILQAVRNKWIPPLYFYHLRTGGHLKAARLHLKSDFFAVVDIKQFFQSTSRSRITRDLKSYFTYSQAREISTFSTVRNLSHSPHKHVLPFGFVQSPILATLCLDKSYFGSLLRRLNKHHDLKLSVFMDDVIISSNDLAQLQAAYDEALVAMRKSGYQANMSKTQAPSSKISVFNLTLSKGVMKVTSQKMSDFLIDFYSSNYEPHRIGVKNYVEAVNPGQAKLFKL

SEQ ID NO: 340 - protein, 257 aa, Klebsiella pneumoniae
MTIEVQRWEDKFEIKPGVWVYVPSVEARKVGGKILQDVRNKWIPPLYFYHLRTGGHLKAARLHLKSDFFAVVDIKQFFQSTSRSRITRDLKSYFTYSQAREISTFSTVRNLSHSPHKHVLPFGFVQSPILATLCLDKSYFGSLLRRLNKHHDLKLSVFMDDVIISSNDLAQLQAAYDEALVAMRKSGYQANMSKTQAPSSKISVFNLTLSKGVMKVTSQKMSDFLIDFYSSNYEPHRIGVKNYVEAVNPGQAKLFKL

SEQ ID NO: 341 - protein, 256 aa, Escherichia coli
MTLELQRWKHKFEIKPGVWVFAPSPEAVKNGSKILNAVRKHWNPPLYFFHLRTGGHLKATRLHLKNTYFAVVDIKQFFLSTSRSRVTRCLNEYFSYEKAREISRYSTVKNPSSGLHKYVLPFGFVQSPILATLCLDKSYLGSLLRKLSRKGTMKLSIYMDDVIISSNDFQTLQTTYQEILQAMEKSGYKLNLKKSQPPSNKIVVFNISLRHGNMSVTAERLSEFLIDFYASNDEQHKLGIANYVRSVNLEQAKLFR

SEQ ID NO: 342 - protein, 252 aa, Enterobacter hormaeche
MVKWEHRFELKKDKWVYVPTKEMRLYGTEIHNHLRAKWIPPLYFYHLRDGGHVACAKKHLHNRYFALIDIKNFFESTGQSRLTRELKTYLTYNNARQVAKLSTVRNPLPERPKYIIPYGYPQSPILSTFCLHKSFCGNLFKQLHVNPDIDISIYMDDIILSANDLSSCESAYRLLSEGLERSGYQMNTLKSQFPSEKIHVFNLELKHNSLRVLPFRLIEFLIAYTKSKNRHERKGIASYVGSVNTDQAKLFK

SEQ ID NO: 343 - protein, 257 aa, Enterobacter sp.
MEIEVQRWEHKFEIRPGVWVYVPSVRTSELGERILQSIRNKWIPPLYFYHLRTGGHLKAARLHLKSSFIAVIDIKHFFQSTSRSRITRDLKAYFTYSQAREIAKFSTVKNLSDTPHKHVLPFGFVQSPMLATFCLDKSHLGSLLRRLNKHPNVKLSVYMDDVIISSNDIVQLQTTYDEILLAMDKSGYQVNMIKTQAPSSLIKVFNLYLSKGNMKVTSQKMSDFLIDFYASDYEPHKIGVKNYVESVNPEQAKLLKL

SEQ ID NO: 344 - protein, 256 aa, Yersinia enterocolitica
MSNMAPRWINKFEIKPNVWVYEPSEACREEGAEILRFINRKWKIPTYYYHLRRGGHVEALRVHIENDWFVSLDIKEFFQSTSRSRVTRTLRNFLPYEKARIIAKVSTVSNFTNDKFSHFIPFGYVQSPLLATICLHYSSFGQLIKELSRCEDVKLSVYMDDIILSSSSLELLERTKTLLEESASRSHYKLNTLKVQGPAERITAFNIDLSHQSMVISPKRLLSFLVDFNSPDSDNLKREGIRSYIYSVNSEQAEYF

SEQ ID NO: 345 - protein, 435 aa, Magnetomorum sp.
MSTIDVTLKEVADPIRLKLAWTKIKKKGSIGGVDGVTISSFNANLEVNLSELSNQILTNQYTPEPLQAAHIPKPGKSEKRQLGLPSLKDKIVQSSLASILSDFYEIHFSNCSYAYRPGKGSVKAIGRVRDFLNRKNYWIASVDIDNFFDSVDHEICTSILKEQISDQSIIRLISLYFSSGMIKFDQWQDTEIGIPQGGAISPVISNIYLNKLDHFLHTLNAFFVRYADDIILFSNTQQSLSETYQKTNEFLNKKLNLKLNALDNPIINVSKGFSFLGIYFHRCQLKIDFKRIDEKIEKMKYIIHKQKQIDAVIKEINEFFNGVQRHYGNIIPDSYQLKNLESTVLDELSIFLAKMKNEGHINSKKACKLVLDPLVFMSERTKSQRDAVIDKIIADAFTIVDQKKDTDEKRIEKSVDSAIHQKRQAYAKKIATETE

SEQ ID NO: 346 - protein, 437 aa, Tissierellia bacterium
AGVQRTLPAETDGQDNGEASTFDLLERILSSNNMNAAYKQVVRNKGSHGIDGMKVDELLPHLKENGNNLIEELKAGTYRPKPVRRVEIPKPDGGVRLLGIPTVVDRMIQQAIAQILTPIFDPEFSESSFGFRPGRSAHQAIKRAQEYMDEGYNWVVDIDLAKYFDTVNHDKLMALVARKVKDKRVLKLIREYLKAGVMINGVVIETEEGCPQGGPLSPLLSNIMLDELDKELEKRGHKFCRYADDCNIYVRSRKAAERTMQSVTKFLEGKLKLKVNREKSAVDRPWKLKFLGFSFYRGKEGIRIRVHRKSIERVKEKIRNITSRSNGMSMDTRLLKLKQLIRGWVNYFRIADMKSLAQSLDEWTRRRLRMCIWKQWKRVRTRFQNLMKLGLDRQKALEFANTRKGYWRIANSPILSVTITNERLQKRGYTGFVAELA

SEQ ID NO: 347 - protein, 418 aa, Oceanobacillus timonensis
LEQILARENLMTALHRVERNKGSHGVDGMPVQNLRAHIMEHWASIREQLETGTYYPQPVRRYEIHKEGGGMRKLGIPTVLDRFIQQAIAQVLTTIYDPTFSENSYGFRPKRRGHDAVRKARAYMKDGYRWVIDMDLEKFFDKVNHDRLMRTLSRRVKDPKVLQLIRRFLQAGIMEDGVVHPNTEGASQGGPLSPLLSNIVLDELDKELEKRGLHFVRYADDFHIYVRSKRAGHRIMESITNFIEKKMKLEVNKEKSAVDRPWKRKFLGFSFTFHKENPKIRIAKESIKRFKRRIRELTSRKKSMNMGDRIEKLNQYLAGWLGYYQLAETPTIFKELDGWIRRRLRMIRWKEWKKVKTKHKNLVKQGIKKGKAWEWANTRKSYWRTANSPILHRALGDQYWSEQGLKSLTNSYLTKRWT

SEQ ID NO: 348 - protein, 419 aa, Paenibacillus sp.
LEQLLSRENLLQALKRVESNKGSHGVDGMTVKSLREHIVQNWQKIRQAIEEGTYEPSPVRRVEIPKPNGGGVRKLGIPTVTDRMLQQAIAQVLTPWFDPPFSEHSYGFRPKRRGHDAVRKARTFMKEGYRFVVDLDLEKFFDRVNHDRLMMKIAEKVKDKKVLLLIRKYLQSGVMENGLVQPTREGAPQGGPLSPLLSNIVLDELDKELEKRGHRFVRYADDCNIYVKTLRAGERVKASVTRFIETRLKLKVNQAKSAVDHPWKRKFLGFSFSTDIEPKVRIAKQSLQKAKVRIREITSRKKPMRMEERMKELNQYLMGWCGYFSLADTPSIFQRMDAWIRRRLRMCLWKQWKNPRTKVKRLLSLGMPKGKAYEWGNTRKGYWRIAGSPILSRALNNQYWESNGLKSLLDRYNSIRNIS

SEQ ID NO: 349 - protein, 418 aa, Bacillus sp.
LMKPILSRENLLNALKRVERNGGSYGVDKMSTQNLRLYIVEHWAELRNALQQGTYEPQPVRRVEIPKSNGGVRLLGIPTVLDRFIQQAITQTLTPIYDPTFSENSYGFRPQRRGHDAVRKAKGYIEEGYRWVVDIDLEKFFDKVNHDKLMGLLSKRIDDKTLLGLIRKFLNAGIMIGGVVSQNTEETPQGGPLSPLLSNIILDVLDKELEDRGHKFVRYADDCNIYVKSKKAGIRTMEGITAFIEKGLSLKVNHDKSAVDRPWNRKFLGFSFTNRKEPKIRIAKQSIKRFKLKVKEITSRKSPIPMEIRIQKLNQYLVGWCGYYALADTPSVFKDLEGWIRRRLRLCYWKQWKLPKTRIRKLIGFGIDKHKAYEWGNTRKGYWRITNSPILSRALNNAFWRKEGLKSLYERYESLRHT

SEQ ID NO: 350 - protein, 419 aa, Sporosarcina sp.
LMERILSKENLLSALKRVERNKGSHGVDEMRVQNLRTHIVNHWEPIKMELLKGDYEPQPVRRVEIPKPDGGVRLLGIPTVMDRFIQQAIAQILTSVYDPMFSDHSYGFRPKRSAHDAVRKAKGYLTEGNRWVVDIDLEKFFDKVNHDRLMGTLAKRIQDKRLLKLIRKYLKSGIMINGIVSASEEGTPQGGPLSPLLSNIVLDELDSELEKRGHKFVRYADDCNIYLKTKKAGSRVMNSVTSFIEKKLKLKVNLDKSAVDRPWKRKFLGFSFTFHKEPKVRIAKESLQRMKNKIREITSRKKPCPLAYRIKKLNQYLMGWCGYFALADTPSVFRNFDSWIRRRLRMCMWKAWKLPKTKVRKLTGLGIPKGKAYEWGNTRKSYWRISNSPILHRALDNSYWNHQGLKSLSSRYEVLRNQP

SEQ ID NO: 351 - protein, 418 aa, Bacillus freudenreichii
MERILSRGNLLSALKRVERNKGSHGVDGMSVQNLRRHIMEHWESLKAELLEGTYQPQPVRRVEIPKPDGGVRLLGIPTVTDRFIQQAIAQVLSSIYEPTFSNHSYGFRPNRSAHDAVRKTKEFIKEGKRWVVDIDLEKFFDRVNHDRLMGTLSKRIKDKRLLKLIRSYLKAGVMINGLVSANEEGTPQGGPLSPLLSNIVLDELDKELEKRGHAFVRYADDCNIYVNTQKAGSRVMASLTSFIEGKLKLKVNQGKSAVDRPWKRKFLGFSFTSGKEPKVRIAKESIKRMKQKIRDITSRKKPYPMEYRIEKLNQYLMGWCGYFALADTPSIFIRLDSWIKRRLRMCRWKEWKQPKTKMRKLIGLGVPKWQAYEWGNSRKGYWRISKSPILHKTLGNSYWSTQGLKSLISRYESLRHIS

SEQ ID NO: 352 - protein, 419 aa, Niallia circulans
LLNQILSRENMLQALKRVEQNKGSHGVDWMPVQILRQHIVENWHSIREAIFKGTYEPMPVRRVEIPKSDGGVRLLGIPTVKDRLIQQAIAQVLSKIYDPMFSEHSYGFRPNRSAHDAVRKAKGYIKEGYRWVVDMDLEKFFDKVNHDRLMGTLAKRINDKPLLKLIRKYLQAGVMMDGVISSTEKGTPQGGPLSPLLSNIVLDELDKELESRGHKFVRYADDCNVYVKSKRAGERTRASIQRFIEKKLRLKVNEKKSAVDRPWKRKFLGFSFTSSKEPKIRIAKESLKRMKMKIREITSRKMPYSMRYRMEKLNQYLMGWCGYFALADTKSLFIKLDGWIRRRLRMCQWKDWKKPKTRIRNLIHLGVPKGKAYEWGNSRKGYWRVSNSPILDKTLDISYWNNQGFKSLQTRYKFLRHLS

SEQ ID NO: 353 - protein, 419 aa, Lysinibacillus sp.
LMNQILSRENLLLALKRVERNKGSHGVDKMPVKFLRQHVVENWLTIKKQILEGTYQPQPVRRIEIPKPDGGVRLLGIPTVTDRLIQQAIAQVLSNLYDPNFSNHSYGFRPKRSAHDAIREAKGYIKEGYRWVVDMDLEKFFDKVNHDRLMSTLAKKISDKPLLKLIRRYLQSGVMINGVVYDTDEGTPQGGPLSPLLSNIVLDELDKELEKRGHKFVRYADDCNIYVKTKRAGERVMASIKTFIEKTLRLKINEKKSAVARPWQRKFLGFSFTSRKEPQVRIAKESIKRMKNKIRELTARKKPFPMEYRIQQLNQYLIGWCGYFALADTKSIFESLDGWIRRRLRMCLWKDWKKPRTKVRNLIRLGVPDWKAYEWGNTRKSYWRISKSPILHRTLGNSYWSNQGLKSLQARYEILRYSS

SEQ ID NO: 354 - protein, 419 aa, Psychrobacillus vulpis
LLNQILSRENLLQALRRVEKNKGSHGVDKMPVQTLRQHMKDNWLSIKEQLLEGTYEPQPVRRIEIPKPDGGVRLLGIPTVTDRLIQQAIAQVLSRLYDPTFSEHSYGFRPNRSAHDAVRKAKGYIKEGYRWIIDMDLEKFFDKVNHDRLTSTLAKRINDKPLLKLIRKYLQSGVLINGIVLDINEGTPQGGPLSPLLSNIVLDELDKELEQRGHRFVRYADDCNIYVKSKRSGERVMESVQTFIERKLRLKVNKKKSAVDRPWKRKFLGFSYTSNKEPKVRIAKESLQRMKKKIREITSRKKPYPMEYRIEQLNRYLIGWCGYFALADTKLIFGEIDGWIRRRLRMCLWKNWKKPRTKVRNLIRLGIPDGKAFEWGNTRKGYWRISNSPILSRALNNSYWSNQGFKSLQARYEILRYSS

SEQ ID NO: 355 - protein, 418 aa, unidentified
  source 1..418: note = Bacillaceae
MERILSRENLLNAIKRVEKNKGKHGVDEMPVAALRGHIMLNWNELRKSLSEGTYIPSPVRRVEIPKPDGKGKRKLGIPTVTDRFIQQAITQVLTKMYDPGFSECSFGFRPKRRAHQAVKLAQSYIEEGYRWVVDIDLEKFFDKVNHDKLMSKLAERINDRTLLKLIRRFLTSGVMEGGLVSPNLEGTPQGGPLSPLLSNIVLDELDTELERRGHRFVRYADDCNIYVKSKRAGERVMKAMTHFIEGKLKLKVNRDKSAVDRPWRRKFLGFSFTSNLKPKVRISPQSIKRFKDKIRKLTSRRRSIAMEVRIHDLNEYLVGWVNYYHLADTRSVITKLEGWVNRRLRMIRWKEWKLPRTKIKKLIELGVPEGKAYKWGNTRKAYWRISKSPILHKTLGKAYWLSLGLKSISARYDLQRST

SEQ ID NO: 356 - protein, 419 aa, Thermaerobacter subterraneus
DLMEQVVARENMWAALRRVEQNRGAPGVDGMTVEQLRGFLREQWSQVRAQLLAGTYKPQPVRRVEIPKPGGGTRLLGIPTVLDRLIQQALLQVLTPIFDPDFSEHSYGFRPGRSAHQAVEAARRHVEEGYAWVVDLDLEQFFDRVNHDVLMARVMRKVADKRVRMLIRRYLQAGVMVGGVKVRTEEGTPQGGPLSPLLANILLDELDKELERRGHRFVRYADDCNIYVRSERAGHRVMAGVRRFLEKRLRLKINEQKSAVDRPWRRKFLGFSMYRGREGIRLRVAPQTVQRLKDRIRGLTSRTWPVSMPERIRRINAYLRGWLAYFRIADMAVLLRNVEGWLRRRLQACLWKQWKRPRTRLRELRALGHPEWRVRQWALSRRGYWAMAGGPLNSALGKPYWLAQGLLSLTRCYHELRRA

SEQ ID NO: 357 - protein, 423 aa, Caenibacillus caldisaponilyticus
ALLETILSRNNLITALKRVEANKGAPGIDGVPTEQLRDDIRKHWKSIKRQLLEGTYKPAPVRRVEIPKPNGGVRLLGIPTVMDRFIQQAILQVLTPIFDPHFSPYSYGFRPKRRAHDAVRQAQKYIQEGYRYVVDIDLEKFFDRVNHDILMSRVARKVEDKRVLKLIRAYLKAGVMLEGVRVRSEEGTPQGGPLSPLLANILLDDLDKELEKRGLKFCRYADDCNIYVRSPRAGQRVKQSVQKYLEKKLKLKVNEEKSAVDRPWKRKFLGFSFTSQREARIRLAPKSVQRFKNKIRQLTNPNWSLPMEERIRKLNQYTMGWMGYFALIETPSPLKRLEEWIRRRLRLCRWHQWKRVRTRIRELRALGLKEHEVFEIANTRKGAWRTTRTPQLHKALGKAYWLKQGLKSLTQRYFELRQDWRTA

SEQ ID NO: 358 - protein, 419 aa, Caldibacillus debilis
ALLERILARDNLITALKRVEANRGAPGIDGVSTDQLRDYIRTHWSSIRAQLLEGTYRPTPVRRVEIPKPNGGIRLLGIPTVMDRLIQQAILQELTPIFDPDFSPYSFGFRPGRSAHDAVRQAQRYIREGYRYVVDIDLEKFFDRVNHDILMSRVARKVKDKRVLKLIRAYLQAGVMIGGVKVQTEEGTPQGGPLSPLLANILLDDLDKELEKRGLKFCRYADDCNIYVKSLRAGLRVKQGIQRFLEKKLKLKVNEEKSAVDRPWKRTFLGFSFTPEREARIRLAPKSIQRFKQRIRQSTNPNWSLPMEERIRRVNQYTMGWMGYFQLIETPSILRNMEGWVRRRLRLCLWLQWKRVRTRMRELRALGLNERTVLEIANTRKGAWRTTKTPQLHQALGKSYWKAQGLKSLTQRYFELRQG

SEQ ID NO: 359 - protein, 466 aa, Brevibacillus composti
CRKQNSERNSFGKVGVKPRGYRRGQSIDRQDLSLVLRREKYRVELLEQILERKNLLEALKKVESNGGAAGIDGVSTEHLRAYVVEHWEKIRQQLLDGTYKPAPVRRVEIPKPDGGVRLLGIPTALDRMLQQAILQVLTPIFDPGFSPNSFGFRPGKRGHDAVRQAQRFIREGYRIVVDIDLEKFFDRVNHDILMSRVARKVKDKRVLKLIRKYLKSGVMAGGIVSHTEEGTPQGGPLSPLLSNIMLDDLDKELERRGLHFSRFADDCNIYVKTKRAGERVKASIERYLEGKLKLKVNKEKSAVERPWKRKFLGFSFTAQKEARIRISPKSLKRVKDKIRTLTKPTWSISMKERIQQLNQYLMGWIGYYALIETPKPLAELESWLKRRLRLCLWHQWKRVRTRYRELRKLGLTHQQAFEIASTRKGAWRTSITPHLHKALGNAYWQSQGLKSVTQRYFEIRQGWRTA

SEQ ID NO: 360 - protein, 423 aa, Thermicanus aegyptius
DLMEQILSRQNLLEALHRVESNKGAVGIDGVSTEQLREYVMKHWGTIRQQLLEGTYKPSPVRRVEIPKPDGGVRLLGIPTVIDRLIQQAILQVLTPIVDPGFSPNSFGFRPNRRGHSAVRQAQRFIREGYRIVVDIDLAQFFDRVNHDILMSRVARKIKDKRVLKLIRAYLQSGVMTGGVCVSSEEGTPQGGPLSPLLGNILLDDLDKELERRGLRFCRYADDCNIYVKTRRAGERIKASVTRFLEGRLKIKVNEEKSAVDWPWKRKFLGFSFTFEKEARIRLAPKSLKRVKNKIRELTTPTWSISMKERIRILNQYLMGWMGYYALIETPSILKTLEQWTRRRLRLCLWHQWKRVRTRIRELRALGLPERQVLEIANTRKGAWRTSQTPHLHKALGIAYWQSQGLKSLTQRYNELRQGWRTA

SEQ ID NO: 361 - protein, 462 aa, Thermobacillus composti
RSRDGHRQQNTSQEGCQREVAVKPQGTVGVPSPLPAQIAPSSRKAQDDLLEKMLERENLLKAYRKVVQNGGAPGVDGVTVTELQAYLNTHWEAVKAALLAGTYSPLPVRRVEIPKPGGGVRLLGIPTVMDRLLQQALLQVMEPIFDPHFSWHSYGFRPGKRAHDAVRQAQQYIQSGLRWVVDMDLEKFFDRVNHDILMARVARRIDDKRVLKLIRAYLNAGVMAGGVVVRTEEGTPQGGPLSPLLANILLDDLDKELTRRGLHFVRYADDCNIFVASKRAGERVMESVIRFVEGKLKLKVNRDKSAVDRPWNRKFLGFSFLSNKQATVRLAPKTIQRFKKKVREITDRSRPLTMEERIHRLNRFMMGWIGYFRLAAAKNHCGNLDAWMRRRLRMCLWKQWKRPRTRLRNLRALGVPEWAARMMANSRRGPWEMSRNTNNALPTSYWEAKGLKSLLSRYLELC

SEQ ID NO: 362 - protein, 462 aa, Paenibacillus sp.
RSHEEQRQPNISQESCQQREAVKPSGYAGAPSSSSAQVAPSSREDQNNLLERLLEGDNLRLAYKRVVQNGGAPGVDHVTVANLQAYLKTHWETVKAELLTGTYRPAPVKRVEIPKPGGGVRLLGIPTVMDRFLQQALLQVMNPIFDAQFSWYSYGFRPGKSAHGAVKQAQRYIQSGLRWVVDLDMEKFFDQVNHDMLMARVARKVADKRVLTLIRAYLNAGVMVDGKLERSWEGTPQGGPLSPLLANILLDDLDKELTGRGLRFVRYADDCNIFVASKRAGERVKESVCRFVEGKLKLKVNREKSAVARPWHRKFLGFSFLSQKQATIRLAPKTISRFKEKIRELTNRTWSISMEERISRLNRYMMGWIGYFRLASAKTHLQNLDQWIRRRLRMCLWKQWKRVRTRIRELRALGVPEWACFMMGNSRRGVWEMSRNINNALRASYWEAKGLKSLLSRYLELG

SEQ ID NO: 363 - protein, 409 aa, Synergistales bacterium
ERVLSQQNMHEALKQVRRNKGAAGIDGMETADLRPWLIEHWVRIREELLGGTYKPLPVRRVEIPKPDGGVRLLGIPTVVDRLIQQALHQELYHIFDPGFSESSYGFRKYHSARQAVEKARRYIGEGFRYVVDMDLEKFFDRVNHDMLMARVARKVTDKRVLKLIRAYLEAGVMTGGLFGETREGTPQGGPLSPLLANIMLDDLDKELEKRGHRFVRYADDCNIYVRSRRAGERVMDGMRKFIENRLKLKVNEAKSAVDRPQNRKFLGFSFTGEKEPRIRIAPKALERFKNTVRRLTDRGRSTSTEERIRRLSEYLRGWAGYFRLAQTPSVFQKLDRWIRRRLRMCILKQWKNIRTKRRKLVSLGLSHDDAMKIASSRKGYWRLAETPQLHIAMGNRYFKTLGLVSLASG

SEQ ID NO: 364 - protein, 469 aa, Syntrophothermus sp.
ASSRREQRQQKIPSGSYPQKEAVNPQGAGEAPSSLPAQTTGTTREANRTNLMEMVVERENMIRALKRVEANKGAAGVDGMKVEDLREYLKESWPEIREQLLAGTYHPKPVRRVEIPKPDGGVRLLGIPTALDRIIQQALLQILTPTFDPEFSPFSYGFRPYRKAENAVRRAQEYISEGYRWVVDMDLEKFFDRVNHDILMSRVARKVKDKRVLRLIRRYLQAGVMVNGCCVATEEGTPQGGPLSPLLANIMLDDLDRELMRRGHCFVRYADDCNIYVKSQRAGERVMESVKRFVEGELKLKVNLQKSAVDRPWKRKILGFSFTWDKEPRIRLAPKTIKRFKDKIRELTKRSRSQSMEDRIGALNTYLMGWIGYFKLADTRSVLQSLDEWVRRRLRMCYLKQWKKPKTKLRNLIVLGIPADWAALISGSRKGYWRLANTPQMNKALGLAFWRNQGLRSLVGRYDQLRFTS

SEQ ID NO: 365 - protein, 420 aa, Leptospiraceae bacterium
EEILADENLQEALQRVCANKGAAGIDGITTTEFHKQMSEEWKETKQRLLLGKYKPKGVRRVEIPKPAGGIRMLGIPTVMDRFIQQAMLQRLTPIFDPEFSKFSYGFRPNKSAHDAVRQAKKYIEEGHKFVVDIDLEKFFDKVNHDILMHLVGKKIRDKRVLRLIGSYLRAGVMTNGVCIPNEEGTPQGGVISPILANIMLNELDKELEARGHKFCRYADDCNIYVKSMKAGERVKASITRFLNKKLKLKVNETKSAVDKPMNRKFLGFTFGNVDSVVIQISSQSLERVKNKIRELTNPMRSVSMEERIKVINRYIIGWLGYYSLIEVPETIESIDGWLRRRMRSCQWQQWKKPKTRIRELIKLGLKESTARKMGYSRKGNWRCSRTPAMHKAMGIKHWKDRGLINLVARYEIYRESWRTA

SEQ ID NO: 366 - protein, 438 aa, Streptococcus sp.; identical to SEQ ID NO: 271

SEQ ID NO: 367 - protein, 385 aa, Tibeticola sediminis
GTANELPLLEQALSDDRLLAGWERVRANAGGPGVDGVTVEQFGGKVLRALAGLRQRVTASHYQALPLRRIEITRPGKAPRVLAVPCVADRVVQSAVALTISPRLDPGFEDFSFGYRPGRSVPRAVQHLAEARDSGLVWVAEADIQSCFDRIPWAALLQRLGEVLPDAGLLALIQHWLSLPLQWPDGHQQVRCMGVPQGSPLSPLLSNVFLDGMDKELAAGPWRVIRYADDFVIAAASREEARRGLAQAARWLRRLGLRLNLDKTRVIHFDQGFSFLGVRFRGRQMSAVQPGAEPWVLPRATQPRPHSPSSKPAQHSRSPAPTARASAPATPPSAQPEPLGPAAPSPNAAASAQPSQPRAADATLQDLQRLSVAPPNEPSPPRLRT

SEQ ID NO: 368 - protein, 331 aa, Accumulibacter sp.
MSTLPTPSSTDQDSPPPFWTLARLAEALEHVSARQGGAGADEQTLAEFAADAEAQLGLLALQLTQGSYRPAPARLIPVAKPGGGVRELLLPAVRDRIVQSALARYLADLLEPDFGEASHAYRPGHSVATALHRLQALRDGGLVFVAVCDIHHFFDSVDHRRLFSLLDDLPLERRLREQMKTCVRIEVADVQGQGAWSLARGLAQGSPLSPVLANLFLMAFDAACARAGLALVRYADDCVLACASETEAQSALAFAADALENIGLALNTRKSRLASFAEGFEFLGAFCGAEGMLGGRPGEAACLPPTTGPVHEAAAADDERPPSHGHRPRLR

SEQ ID NO: 369 - protein, 598 aa, Butyricicoccus porcorum
MNPTSDILERIAESSKSHTDGVFTRLYRYLLREDIYFTAYKNLYANAGASTKGTDDDTADGFGAKYVSDIIESLRNLEYSPKPVRRIYIPKHNGKLRPLGIPSFRDKLIQDAIRQILEAIYEPIFSDDSHGFRPGRSCHTAFDRIKYGFNGTKWFIEGDIKGCFDNIDHKVLLNILSKKVKDSKLINLIGAFLKAGYMEEWKYFQTYSGTPQGGILSPILANIYLHELDKKVAEIKQRFDSNEPKKYTEEYGGICHRISTLHRKSKNNPDSPDREKWIAEEVELKRQRVKIPVYQDNNKRICYVRYADDFLIGVVGSKEDCVEIKAELKDFLAAELKLELSDEKTKITHSSESARFLGYDVSVRRSQELKRRSDGVKQRTLNGTVMLNAPLKDKIEEFLISNGYGVRTADGRIVPIATKGLRNRSDFEIVSTYNSQMRGICNYYRMASNFPKLDYFVYIMEYSCLKTLASKHQTTMAKARGDRRTGKRWGVPYETKTGTKTLIFLNMTDIRKSRKAKLDNVDAVPKSVSKQNEIKNRLNAGICELCGCDSEPVVVHHVQSLKALKGKSAWERKMRSIRRKTLIVCETCHNKIHNKTFC

SEQ ID NO: 370 - protein, 599 aa, Acidaminococcus intestini
MKPTSEILERMYRNSEEHSDGIYTRLYRYLLREDIYMTAYKNLYANKGAGTEGVDNDTADGFGKEYVNQIIDELKNQTYEPKAVKRVYIPKRNGKMRPLGIPSFRDKLIQDAIRQILEVIYEPVFSTHSHGFRPNRSCHSALKEISRSFRSTKWFVEGDIKGCFDNIDHTVLLNLLSEKIKDSKFINLIGKFLKAGYMDNWEYHKTYSGTPQGGILSPILANIYLHELDKKVEAMQKEFNAPADYAYTPAYGKKVRGIVKLQKRYGECVDEAEKKELLKQIHKLEVEKRRLPYKDASDKKIAYVRYADDFIIGVSGSREDAERIKQELTLFVATRLKLELSDEKTKITHSSGNAHFLGYDINVRRCQESKRKTNGVLQRTLNNSVELLIPMERIEKFMYDREIVIQGKDGKLIPWQRNSMAGLTDLEIVDTYNSQTRGICNYYCIASNFSKLTYFVYLMEYSCLKTLAKKHKTRISGIKRIFKCGKSWGIPYKTKKEKKRMMIVKFSDFKRGTVFDEPSIDTVKNHIHFNTRNSLEARLKACKCELCGAEGDGIAFEIHHINKMKNLKGKEQWEMAMIARKRKTLVVCKECHKKIHHSS

SEQ ID NO: 371 - protein, 597 aa, Anaeromusa acidaminophila
MKPTSEILERMYQNSAKHTNGVYTRLYRYLLREDIYLTAYKKLYANKGAGTKGVDNDTADGFGMEYVHQIIDELKNQTYMPKPVRRTHIPKQNGKMRPLGIPSFRDKLVQDVIRQFLEAIYEPIFSDRSHGFRPNRSCHTALKQISRSFRGAKWFVEGDIKGCFDNIDHAVLLNLLSEKIKDSKFVTLIGKFLKAGYLEAWQYHATYSGTPQGGILSPILANIYLHELDKKVEQLKQDFSRPAEKVRTTIYSTKAREIERVRKLYADCVSDEERKEVLDKIQKLKTEIRTLPYKDATDKKLAYVRYADDFIISVCGTREECEEIKQQLKSFLSEKLKLELSDDKTKITHSSENARFLGYDVNVRRNNECKRKGNGTIQRTLNNSVELLVPFEKIERFMFERKIVKQDKDGTLIPWQRLSMYGLTDLEVLDTYNSQTRGICNYYSLASNFAKLKYFVYLMEYSCLKTLAQKHKTRISAIKRKYKAGHSWGIPYETKNGAKKMMSIKFSDLNKSAIFNGEVDKITHHAHFTNANSLENRLKMKKCELCGADSNTTFEIHHINKLKNLKGKEQWERAMIARKRKTLVVCKSCHNGIHHSS

SEQ ID NO: 372 - protein, 598 aa, Faecalibacterium sp.
MKPTIEILTRLQENSKNNHEEVFTKLFRYLLRPDIYYVAYQNLYANNGAATKGVDEDTADGFSEDKVNRIIEALRNGTYEPKPVRRTYIKKKNGKMRPLGLPTFTDKLVQDVIRMVLQAIYEPVFSNYSHGFRPGRSCHTALAQLKHEFIGAKWFVEGDIKGCFDNIDHSVLIGIVGKKVKDARFINLLRLFLKAGYMEEWKYYGTYSGCPQGGIISPILANIYLNELDTFVEKLKKSFDTNTPYTLTPQYRALQNKRANTKQKINRREVGEERDQLIAQYIGLGKELRKTPAKLCNDKKLKYVRYADDFLIAVNGSKEDCEWIKAQLTEFIRGTLKMELSQEKTLITHSNDCARFLGYDVRVRRDQQVKPWKNCKQRTMNNTVELLIPFRDKIEKYLFAKGAVKQRPDNGKLEPVARIGLTRNTDLEIVTTYDAELRGLCNFYYLASNYRNLNYFSYLMEYSCLKTLAWKHKCKLSKIYDKYRIGAKRWGIPYETKSGRKVRKLTKFNEVDGKRCEDAIPTIVTIIAKSRTTIDSRLKACRCELCGYEGKDRKYEVHHVNKVKNLKGKEPWEIVMIAKRRKTLVVCHECHQKIHHGY

SEQ ID NO: 373 - protein, 597 aa, Amphibacillus jilinensis
MKPTMEILTKLQENSKKHHDEVFTRLFRYMLRPDIYFVAYQHLYANRGAGTKGINEETADGFSEKYVEQIIEALRTETYRPKPVRRTYIKKSNGKMRPLGLPTFTDKLVQEVIRMILESVYEPIFSNNSHGFRSGRSCHTALTQIKNQFIGARWFVEGDIKGCFNNIDHTILTKIIGKKIKDARFIKLVHLFLKSGYMENWKYYGTYSGCPQGGIISPILANIYLNELDNFMEKIKQDFDNRTPYQLTAEYKKVMNKRSSLSQKIKRCEAGARRDGFIEEYNNLSQQIYKIPAKLCNDKKLMYVRYADDFLIAVNGNKQDCEWIKAKLTEFIHNDLNMELSQEKTLITHSSICARFLGYDVRIRRSQQIKAWKKTKQRTMNNSVELLIPLEDKIQSFLFSRGIVRQRKDNGKMEPFRRNSLLRQTDLEIVSTYDAELRGICNYYSLAVNYSKLNYFSYLMEYSCLKTLATKHRTKISKIISKCRMANKRWGIPYQTKSGMKRKRLTKIYEIDRKKCEDIFPRAITIYAKGKTTFDDRLKAKVCEVCGRTDSERYEIHHVNKVKNLKGKEPWEQIMIAKRRKTMVVCHECHQKIHHGF

SEQ ID NO: 374 - protein, 599 aa, Clostridioides difficile
MKPTVEILTKLQENSKKHHDEVFTRLYRYLLRPDIYYEAYQHLYSNKGAGTKGITEDTADGFSEKYVERIIELLKAETYLPKPVRRTYIKKSNGKMRPLGLPIFADKLVQEAIRMILEAVYEPVFIDYSHGFRPGRSCHTALAQIKKEFTGARWFIEGDIKGCFDNISHAVLVEVIGRKIKDARFLKLIRSFLKAGYMENWKYHETCSGCPQGGIISPILANIYLNELDQYIMKLKKDFDVTAKAPYTPEYSRIIWKRQRLHNRIKDSEGMEREQLIDEYKSATAQMFKIPAKLCEDKKIKYVRYADDFLIAVNGSRQECEVIKGQLTEFVHNTLKMELSQEKTLITHSNTPARFLGYDVRVRRDQQIKPKGRFKTRSMNNKVELNIPFKDRIEKFLFANGIVEQRKDNGKLEPCKRPQLLNMTDLEIVTVYNAELRGICNYYGIASNFNKLIYFNYLMEYSCLKTLANKHCSKISKVREMYKDGTGEWGIPYQTKKGMKRMYFAKYSDCKGKRFTDIIPQQAKNHSHNTTTFESRLKAKACEICGCTDSDKYEIHHVNKLKNLKGKTKWEQVMIAKRRKTIVVCHKCHMVIHHGGKKE

SEQ ID NO: 375 - protein, 598 aa, Faecalibacterium prausnitzii
MKSTMEILTKLQENSQKNQDEVFTRLYRYLLRPDIYFIAYQHLYSNKGAGTKGVNDDTADGFSEQYVTAIIEALRTGSYEPKPVRRTYIQKKNGKLRPLGLPVFADKLVQEAIRMILEAIYEPIFSIYSHGFRPGRSCHTALAMIKHEFTGAKWFIEGDIKGCFDNIDHSTLIGVLNRKIKDARFLNLIRMFLKSGYMEDWDFHETYSGCPQGGIISPILANVYLNELDRYITQLKKEFDHGYNPRNFTEEYNAIRHKRDALHEKIKKAEGTMREQLIAQHKQLTKQLFRTPAKACTDKRLKYVRYADDFLIAVNGTREECEAIKAKLTDFVRDTLKMELSQEKTLITHSNTPARFLGFDVRVRRDASVKRSGKRKMRTMNNKVELNIPLKDKVETYLLSHSIAKRDRKRLIPIHRPILLNRTDLEIVMIYNAELRGLCNYYAIASNFNKLVYFGYLMEYSCLKTLANKHRSRISKVRYEYRDGTGAWGVPYETKKGKRRMMFAKYSDCKGKDLTEKVPDLAYRYSHNTTSFEERLKAKVCEVCGCTDSDSYEIHHVNKVKNLKGKADWEKVMLAKRRKTIVVCHKCHMRIHHGTKTE

SEQ ID NO: 376 - protein, 595 aa, unidentified
  source 1..595: note = 1947404.3.peg.615
MKPTTEILVNISKNSSKNKDEVFTRLYRYMLRPDLYFIAYKNLYANKGASTQGIDNDTADGFSKEKIDRIIQSLSDESYQPKPVRRKYIQKKGNSKKKRPLGIPTFTDKLVQEVLRMILEAVYEPIFSNNSHGFRPEKSCHTALNSIKKEFTGTTWFVEGDIKGCFDNINHHVLVDIIGRKIKDARLIKLVWKFLRAGYIEDWKYHTTYSGSPQGGIISPLLANIYLNELDKFAEKTAKAFYKKRDREHTKEYDAVMNALVLVKYHLKKATGQQKSDLLKQKKRLQRQLRKIPCSSQTDKVMKYVRYADDFIIGVKGDKIDCEKIKKQFADFISQELKMELSEEKTLITHSSQFARFLGYDIRVRRDNTVKPHGTHLQRTMNMKVELCIPFQDKIMPFLFNKSIIRQLKDGTLEPIARKYLYSCTDLEILTAFNAELRGICNYYALASNYNRLRYFAYFMEYSCLKTIAGKHKTTARKIISKYSYDGSWRIPYKTKEGIKYSKFADFMKCKKVTDFDEVIKDYAVMHASTRTTFEDRLSAEVCELCGKINAPLEIHHVNKVKNLKGKDFWEIMMIAKKRKTIAVCKECHHKIHHP

SEQ ID NO: 377 - protein, 596 aa, Enterocloster clostridioformis
MQPTIEILDRIRKNSRDNKEEIFTRLYRYLLRPDLYYLAYKNLYANKGAGTKGVNDDTADGFSKEKVDRIIQSLADGTYTPNPVRRKYIQKKQNSTKKRPLGIPTFTDKLVQEVLRMILESVYEPIFSNNSHGFRPNRSCHTALKSLKREFSGVSWFIEGDIKGCFDNIDHQVLANVINAKIKDARLIQLIWKFLKAGYMEDWQYHATYSGCPQGGIVSPILANIYLNELDKFVEKTAKEFYKSRDRHHTPEYDKVTWQIKKAQKQLKTATGQEKTALLQKIAQLKAVMHKTPCMSKTDKVIKYIRYADDFILGVKGDKADCGRIKRQLSDFISQTLKMELSEQKTLITHSNQYARFLGYDIRVRRDQKLKPHGNHVSRTLNGSVELCIPFADKIMPFLFGKSVIRQLRDGTIEPTARKYIFRCTDLEIVSTYNSELRGICNYYSIASNFNKLQYFEYLMEYSCLKTLAGKHESTSRKMMRKYRDGNGSWGVPYQTKAGIKRRSFARFMDCKNTDLWTDKIIDFAIAHIGSRTSFDDRLSARVCELCGKTNVPLEIHHVNKVKNLKGKQLWELAMIAKKRKTLAVCKDCHHKIHHP

SEQ ID NO: 378 - protein, 597 aa, Anaerotruncus sp.
MQPTTAILDRIMRNSRKNNEEIFTRLYRYMLRPDLYYLAYNKLYRNKGAATKGVDDDTADGFSEEKINRIIQSLADETYMPKPVRREYIPKKRSSTKKRPLGLPSFTDKLVQEVLRMILEAVYEPTFSDFSYGFRPHRDCHTALKALKKEFTGVSWFIEGDIKGCFDNIDHQVLVGVISSKIKDARLIKLIWKFLKAGYMEEWKYHTTYSGCPQGGIISPLLSNIYLNELDKFAEKVARAFYKPRDRVRTPEYAKIQCKKDYAQKLLKTATGQKKVELLKRVKSLKSELRKVPCSSKTDKVMKYIRYADDFIIGVKGDKSDCEHIKRQFSDFISEHLKMELSEEKTLITHSNQYARFLGYDVRVRRDGKVKPTDRCLKRTLNYTVELNVPFADKIMPFLFDKAIIKQTHDGKIEYIARKYLYRCTNLEIIDTYNSELRGICNYYSIASNFTSLNYFAYLMEYSCLKTLAGKHKSTSRKIREQFRTGSGDWGIPYNTAKGQQKYRTFAKYMDCKDSDRFNDVIVECAIRHAGTRTTLEKRLSAGICELCGKTNTPLAMHHVNKVKNLKGKQQWEIVMIAKRRKTLAVCKDCHYKIHHP

SEQ ID NO: 379 - protein, 606 aa, Clostridiales bacterium
MKPTMEILERIKKNSEENKDEVFTRIYRYLLRPDIYFVAYQNLYSNNGASTKGVDDDTADGFSEAKIERIIKCLEDESYQPKPFRRVYIKKPNGKMRPLGIPSFTDKLVQEAVRIILEAIYEPIFMDTSHGFRPNRSCHTALQSVKYEFRGARWFIEGDIKGCFDNINHNVLVSCINKKIKDARFTKLIYKFLKAGFVDDFVYNNTYSGCAQGGIISPILANIYLHELDKFVENLSKEFNEPATEKFTADYRKAQNAMAVTRKKIKKAENADDEVEKAELLKVYKSQRATLLKTPCKSQTDKKLKYVRYADDFIIGVNGSKVDCVRIKQQLSDFISNTLKMELSEEKTLITHSNTYAKFLGYNIRVRRSNTVKPNGRGATQRTMSNGVELAIPLKEKINGFMFKNGIVKQCDNGELEPVCRNDMLRLTDLEIVSGYNAELRGICNYYYMASNFYMLNYFSYLMEYSCLKTLAGKHRCSIGKIKEKFSDHKGKWCIAYETKKGTSYLYLSKYSDCKKGKNATDTRTSMVQIHKNTRSTFESRLKAKCCELCGSTTSNQYEIHHVNKIRNLKGKEPWEIMMLSKRRKTMVVCWECHKKIHNQNFEVKQ

SEQ ID NO: 380 - protein, 603 aa, Ruminococcus callidus
MAEMQPTTEILTRISKNSLNNKDEVFTRLFRYLLREDIWFEAYRNLYANNGASTKGVNDDTADGFSERKIQKITEQLKNGKFNPTPVRRTYIQKKNSDKMRPLGIPTFTDKLVQEAVRMILEAVYEPIFHECSHGFRPNRSCHTALKSLRMKFTGAKWFIEGDIKGCFDNINHDVLIGILNKKIKDARLIQLIQQFLKAGYLEDWIYHRTYSGTPQGGIISPILANIYLHELDKFVENLKEEFDKPSKEKYTLEYRKAKYQTEKARKAIRECDPQDYERKKQLIKNLKAVRSVQLKTPCKSQTDKKIQYIRYADDFILSVNGSREECIEIKKKLSQYISEVLKMQLSDEKTLITHSSNHARFLGYDISVRRNAKIKSKNGGVSLRTLNNKVELLIPLKEKINRFMFDKGVIFQKKDGSLFPTHRSYMIHMSDLEIISTYNSELRGICNYYNLASNYCQLRYFAYLMEYSCLKTLAAKHNTKISKIIAKFKDGKGGWGIPYETKSGKKRCYFAKYSDCKDSKDGTDNISNAAVIYGYSRNTLEERLKAKVCELCGDTNAEYYEIHHVHKVKDLKGKNDWERAMIAKRRKTLVLCRNCHHKVHNQ

SEQ ID NO: 381 - protein, 603 aa, Youngiibacter fragilis
MAEMLPTTEILTRISKNSLKNPNETFTRVFRYMLRPDIWFLAYKNLYANNGASTKGINNDTADGFSEKTISNIIKSLENGEFCPTPVRRTYIAKKSSDKKRPLGIPTFTDKLVQEVLRMVLEAIYEPVFMDCSHGFRPNRSCNTALKSLRLKFTGAKWFVEGDIRGCFDNIDHSVLIRLLNQKIKDERLIQLIYKFLKAGYMEDWTYHRTYSGTPQGGIFSPVLANIYLHELDKFIVNLKNEFDKPSAELYTVEYRKAQWQTVKARKAIKNCDPNNKIQKKQFIKEMKSVRSVQLKTPCKSQTDKKIQYIRYADDFIIAVNGSREDCVEIKNKLSLFISSALKMQLSEEKTLITHSSNYARFLGYDVCIRRNAKVKPKKGGITVRTLNNKVELLIPIKDKLNKFLFNKGIVYQKKDGTLFSTHRTSLIRLSDLEIVSTYNSELRGICNYYSLASNYCQLRYFAYLMEYSCLKTLAAKHNSYISKIINKFQNGKGEWGIPYETKQGPKRCYFAKYSDCKSGKDYTDKITKAAIIYGFSRNTLEERIKAKVCELCGKTNADHYEIHHIHKVKDLKGKADWERAMISKRRKTMVLCRNCHHKIHNQ

SEQ ID NO: 382 - protein, 600 aa, Streptococcus agalactiae
MKPTTEILARISQNSLANKEEVFTKLYRYLLRPDIYFVAYKNLYANNGAATKGVNEDTADGFSEAKIDSIIKALADETYQPMPVRRTYIQKKNNRKKLRPLGIPTFTDKLVQEVLRMILEAVYEPIFLDVSHGFRPKRSCHTALKQLRREFNGTRWFVEGDIKGCFDNINHAVLVGLLSNKIRDARITKLIYKFLKAGYLENWQYHKTYSGTPQGGIISPLLANIYLHELDKFVMKLKSEFDTPGVGQITPEYRELHNEIKRLSHRLTKVTGEEREMVLAEYKPKRQKLMTIPCTAQTDKKLKYVRYADDFLIAVKGNREDCQWIKSKLAEFIGDTLKMELSEDKTLITHSSKCARFLGYDVRVRRSGKIKRGGPGHVKMRTLNGGVELLVPLNDKIRQFVFTKGVAIQKEDGSMFPIHRKYLVGLTDLEIVSVYNAELRGICSYYGMASNFCKLHYFSYLMEYSCLKTLASKHKTSLSKIIDKCNDGTGKWGVPYETKLGSKRRYFANYADCKGKGSATDYISNAAVVYGYAVNTLENRLKAKVCELCGTTESDHYEVHHINKLKNLKGKERWEIAMIAKHRKTLVVCRDCHRSIIHKK

SEQ ID NO: 383 - protein, 599 aa, unidentified
  source 1..599: note = Eubacteriales
MQPTTEILARISKNSLANKEEIFTKLYRYLLRPDLYFLAYNHLYANNGAATKGANNDTADGFSEVKIANIIKSLSDDTYQPTPVRRIYISKKSDPKKKRPLGIPTFTDKLIQEALRMVLEAVYEPVFLNASHGFRPKRSCHTALTSLKKEFNGTRWFVEGDIKGCFDTIDHATLVGFVNNKIKDARIIKLIYKFLKAGYLEDWQYHKTYSGTPQGGIISPLLANIYLHELDKYVMKLKAEFDAPNTEKITPEYRELHNEIKMLSYYIKKADGTEKERLLAEYKPKRKRLMSIPCTSQTDKKIKYVRYADDFIIGVKGSQEDCQWIKSKLAEFISETLKMELSEEKTLITHSSECARFLGYDVRVRRSGEIKRGGPGNAKKRTLNNHTELLVPLNDKIHKFIFSKGIAIQKIDGTLFPVHRNSLLRLTDLEIVTAYNDELRGLCNYYGMASNFHKMKYLAYLMKYSCLKTLASKHKSSISKVIAMFKDGKGDWGIPYETKAGAKRRYFVNYIDCKEAKNPTDIISNAAVIYGQSVTTLEKRLKARVCELCGTAESDHYEIHHVNKLKNLKGRKQWEIAMLAKRRKTLVVCEKCHHEIHNQ

SEQ ID NO: 384 - protein, 598 aa, Faecalibacterium sp.
MQPTTEILERISKNSLTHKEEVFTRLYRYLLRPDIYYQAYQRLYTNKGASTKGANQDTADGFSEAKIEKIIQSLADETYQPTPVRRTYIAKKNNPKKKRPLGIPTFTDKLVQEALRMILEAIYEPLFLDCSHGFRPKRSCHTALEKLKYQFGGVRWFVEGDIKGCFDNINHEALVGFIGNKIKDARIVKLVYKFLKAGYLEDWVYHKTYSGTPQGGILSPLLANIYLNELDQFVMKLKDEFETPEKGQITPEYRALHNKIKNLCYHIDRKQGVEKERMIAECKVLRKQLLKTPCTAQTDKKLKYIRYADDFIIGVKGSKEDCQWIKSKLAEFIGQTLKMELSEEKTLITHSSQCARFLGFDVRVRRCEKVKRNKKGAKMRTLNNHVELLVPFDDKIHDFIFSKKIAIQKKDGKLFPVHRNSLLRATDLEIVTVYNDELRGICNYYGIASNFCKLKYLSYLMEYSCLKTLAAKHKSKISKVVAMYKDGTGEWGIPYETKKKSKRRYFANYMDCKNAKNPTDQISNAAIIYGQSVTTLEKRLKARVCELCGTTESEHYEIHHINKLKNLKGKEPWEIAMLAKRRKTLVVCERCHHLIHNQ

SEQ ID NO: 385 - protein, 600 aa, Streptococcus equi
MKPTMAILERISKNSMEQKDEVFTRLYRYLLRPDIYYIAYQNLYSNKGAGTKGIDDDTADGFSEKKISTIINSLASESYTPKPVRRTYISKKSSSKLRPLGLPTFTDKLIQEVLRLILEAIYEPIFLDTSHGFRPKRSCHTALKMIKREFGGARWFVEGDIKGCFDNIDHQVLISIIQKKVKDARFIKLIYKFLKAGYMENWNYHKTYSGTPQGGILSPLLANIYLHELDLFVLKLKEQFDNPQKDNITSEYRQAHNELKRLSNRLKKVEGNEKQELLEEYLIKRQRLMTIPCTAQTDKKLKYVRYADDFIISVKGNKKDCHWLKQQLADFINGHLKMTLSPEKTLITHSSNCARFLGYDIRVRRSQAIKRGGSGQVKKRTLNGSVELLIPFKDKIHLFLFNKGIVIQKNDGSYFPVHRKNILTATDLEIVTIYNSELRGICRYYGLTSNFNQLNYFAYLMEYSCLKTLASKHKTSLVKIRAKYKDGFGSWAIPYETKTTKKRMYFTDYTKCKSPSTFTDLKSSVAVTYGYSRTTFESRLKAKKCELCGTTDKQTTYEIHHVNKGKNLKGKEKWEQMMIAKQRKTLVVCHHCHRHVIHNH

SEQ ID NO: 386 - protein, 599 aa, Lactococcus cremoris
MKPTMAILERISKNSQENIDEVFTRLYRYLLRPDIYYVAYQNLYSNKGASTKGILDDTADGFSEEKIKKIIQSLKDGTYYPQPVRRMYIAKKNSKKMRPLGIPTFTDKLIQEAVRIILESIYEPVFEDVSHGFRPQRSCHTALKTIKREFGGARWFVEGDIKGCFDNIDHVTLIGLINLKIKDMKMSQLIYKFLKAGYLENWQYHKTYSGTPQGGILSPLLANIYLHELDKFVLQLKMKFDRESPERITPEYRELHNEIKRISHRLKKLEGEEKAKVLLEYQEKRKRLPTLPCTSQTNKVLKYVRYADDFIISVKGSKEDCQWIKEQLKLFIHNKLKMELSEEKTLITHSSQPARFLGYDIRVRRSGTIKRSGKVKKRTLNGSVELLIPLQDKIRQFIFDKKIAIQKKDSSWFPVHRKYLIRSTDLEIITIYNSELRGICNYYGLASNFNQLNYFAYLMEYSCLKTIASKHKGTLSKTISMFKDGSGSWGIPYEIKQGKQRRYFANFSECKSPYQFTDEISQAPVLYGYARNTLENRLKAKCCELCGTSDENTSYEIHHVNKVKNLKGKEKWEMAMIAKQRKTLVVCFHCHRHVIHKHK

SEQ ID NO: 387 - protein, 599 aa, Lactococcus lactis
MKPTMAILERISKNSQENIDEVFTRLYRYLLRPDIYYVAYQNLYSNKGASTKGILDDTADGFSEEKIKKIIQSLKDGTYYPQPVRRMYIAKKNSKKMRPLGIPTFTDKLIQEAVRIILESIYEPVFEDVSHGFRPQRSCHTALKTIKREFGGARWFVEGDIKGCFDNIDHVTLIGLINLKIKDMKMSQLIYKFLKAGYLENWQYHKTYSGTPQGGILSPLLANIYLHELDKFVLQLKMKFDRESPERITPEYRELHNEIKRISHRLKKLEGEEKAKVLLEYQEKRKRLPTLPCTSQTNKVLKYVRYADDFIISVKGSKEDCQWIKEQLKLFIHNKLKMEFSEEKTLITHSSQPARFLGYDIRVRRSGTIKRSGKVKKRTLNGSVELFIPLQDKIRQFIFDKKIAIQKKDSSWFPVHRKYLIRSTDLEIITIYNSELRGICNYYGLASNFNQLNYFAYLMEYNCLKTIASKHKGTLSKTISMFKDGSGSWGIPYEIKQGKQRRYFANFSECKSPYQFTDKISQAPVLYGYARNTLENRLKAKCCELCGTSDENTSYEIHHVNKVKNLKGKEKWEMAMIAKQRKTLVVCFHCHRHVIHKHK

SEQ ID NO: 388 - protein, 597 aa, unidentified
  source 1..597: note = 1638786.3.peg.2502
MNPTSEILERVNKSSSEHHDGVFTRLFRYLLREDIYFAAYQKLYANSGAMTPGSDNDTADGFSAEYVHELIEELRSGKYKPKPVRREYIKKQNGKMRPLGIPSFRDKLLQEAVRMFLEAIYEPLFYDQSHGFRPERSCHTALDQIKTNFRSVKWFIEGDIKGCFDNIDHAVLIKTLEVKIKDSRFINIIRAFLKAGYVEDFQYHTTISGTPQGGIISPILANIYLHELDRKVMKLKEKFDKQSTRHQTPEYLHLAKRRQTLQKKIDRVKGEERELAIKEYKAVCNQKLKTPARMSDDKKLVYCRYADDFLIGISGSREDCEEIKEILREFLSTQYHLELSAEKTKITHSAERVRFLGYDVAVRRSQKIKKKANGVKQRTLNNSVELTVPLEDKIMQFLFKNDIIGQKPNGEIWAVCVPRLRHLSEVDIVNRYNAQIRGICNYYCLAANYDKLNYFRYLMEYSCLKTLASKSNSTTRKIIQKYRHDGKWAIPHEVKGGIKYAKLVSLADCKAGKLMSDKDPWQYKSFDPKKLSQYVRLSAGVCELCGDNSDSCCIYHAGKMKNLKSTTEWGKKMLHMRRKTLIVCPKCFKKIHREQNK

SEQ ID NO: 389 - protein, 596 aa, Aerococcus sp.
MKPTFEILERIEKCSTKYVDGVFTRIYRYLLREDIYHAAYQNLYANKGATTKGIDEDTADGFSNEYVQELINSLKDGSYKAKPVRREYIPKQNGKLRPLGIPTFRDKLLQEVVRMILEAIYEPIFHKNSHGFRPGKSCHTALKQIKTEFTGVVWFIEGDIKGCFDNINHNKLIEILGRKIKDSKFLNIIRQFLKAGYIENWQYNATYSGAPQGSICAPILANIYLNELDKKFDEISTHFDKPSSAYKSPKYHEVDKEMKRLSYWIDNTTDEEERQELIKQYKEQKKSLRTLPCKNKDNKRFTFVRYADDWLVGVCGTKEDCKDLKEEIAKFLDEELKLTLSEEKTLITHSSEKVRFLGYDISVRRNKQVKGHKMKNGKWRQSRTLHMKVALTIPHSDKIEKFMFDKGVIRQKENGEIQPIHRAGLLNLSDSEIVEHYNAEARGLCNYYKLAVDYHTLGYFCYLMEYSCLKTIANKHKTSIRKIINKYKDGKTWSVPYETKAGTKRVKPVKIADCKGGKVEDIIFVRKKFNWKTTIRQRLNAKTCELCGCKNAELYEVHVVKNLKDLGDSNWEQAMKEKRRKTLVVCNKCHKEIHEH

SEQ ID NO: 390 - protein, 599 aa, Streptococcus suis
MKPTSEILERIAKSSTEHKDGVFTRLYRYLLREDIYYAAYQKLYANRGATTKGIDDDTADGFSAHYIKELIHDLENGTYRANPVRREYIPKKNGKMRPLGIPSFRDKLLQEVVRMILEAIYEPVFDDHSHGFRPNRSCHTALRQISSDFTGVVWFIEGDITGCFDNIDHEILIDILARKIKDSKFLNVIRQFLKAGYVENWKYNKTYSGTPQGGIVSPILANIYLNELDKKFNEIKRRFDEPRTSRHEKTPKYREIDNEMKKISYWIDHTDDDEKRKELVKQFKQLKKEIHTIPCHPQTHKKFTFVRYADDWLVGVCGTKEECIALKAEIADFLSKELKLTLSEEKTLITHSSEKVRFIGYDICVRRSQEIKGYKMKNGKWRKSRSLHLKVALTIPHTEKIEKFLFAKKAIIQTNGGALKFKPVHRTALLNLSDSEIVEHYNAEMRGILNYYNLAVDYHTLDYFCYLMEYSCLKTIANKHKTSIRKIVRLYKDGNTWSVPYETKEGTKRVRPIKIADCKRGEASDIVFQRTKFNWKSTIRQRLNAGVCELCGKKHADLYEVHVVRNLNELGNSDWELAMKSKRRKTLVVCSDCHRRIHK

SEQ ID NO: 391 - protein, 597 aa, unidentified
  source 1..597: note = 1950830.3.peg474
MKPTSMILERIAKSSTEHKDGVFTRLYRYLLREDIYFAAYQKLYANKGATTKGIDNDTADGFSSKYVNDLIQELKNGTYQANPVRRVYIEKKNGKLRPLGIPSFKDKLLQEVVRMILEAIYEPVFDKNSHGFRPNKSCHTAMKQISSEFTGVIWFIEGDIKGCFDNIDHQILINIIAKKIKDSKFLNIIRQFLKAGYIENWKYNATHSGTPQGGICSPILANIYLNELDNKFREIQGKFNKARTIEEIKTLEYRTIDNEMKRVSYWINHTENEQERNNLIKKYKALQQEIHKVPCHTKNNKKFTFVRYADDWLAGVCGTKEECVMLKAEIAKFLTEELKLTLSEEKTLITHSSQKVRFLGYNINVRRSKEVKGFKMKNGKYRKSRTLHYKVALTIPHKEKIEKFLFSKGVIMQKANGEIKPIHRTVLLNLSDKEILEQYNAEMRGILNYYRLAVDYHTLNYFCYLMEYSCLKTIANKHKSSIRKIIREYKDKNTWSIPYETKTGIKRIRPVKIADCKKGVVNDVIYKRTNFSFKSTIRQRLNARTCELCGQTGNELYEVHTIKNLNELGNLNWEKAMKKMKRKTIIVCKECHNIIHS

SEQ ID NO: 392 - protein, 601 aa, Clostridium innocuum
MKTTCEILERIQKNSTEHKDGVYTRLYRYLLREDIYYVAYQRLYSNKGATNKGATTKGVDNDTADGFGQVYVQELITQLRNGTYKPKPSRRVYIEKSNGKMRPLSIPSFRDKLLQEVVRMFLEAIYEPIFSDYSHGFRPNRSCHSALKQAKIYFTGAKWFIEGDIKGCFDNINHKVLINILERKIKDSKFINIIRLFLTAGYVDDFKYNATYSGCAQGGIISPILANIYLNELDKKILEIKNKFDKPHQAKYTKEYSHIKSKRDYQKSKLKNCDEEQRKEILRTIDDLNKKLRKTPRTPNDDKNIYFIRYADDFLIAVKGNKNDCEIIKKEIHDFLRDELKLTLSEEKTLITHSSNKALFLGYNISIRRSQTVKSVSQNGRKYKQRTLNNSVALTVPFERIEKFMFKRRMIKQIKPKTFRPLHRKGWLYLPDYVIVERYDAELRGILNYYNLAVDYNYLGYFRYLMEYSCLATIAGKHNSSTSKIVSQYRHGKYWGVPYLTNKGEEKIKRLARLKDCKSNACNDTIVKHRYVKATNASIRDRLQTGVCELCGKRIDVPLEVHIVSKLKDLKDDKPWKVVMKSKRRKTLVVCPECHKHIHVE

SEQ ID NO: 393 - protein, 593 aa, Ruminiclostridium josui
MTKPTSDILERIYKNSSEHKDGVYTRLYRYLLRDDIYYLAYQKLYSNKGASTKGIDNDTADGFGKKYVDSLIKELSDGTYTPKPVRREYIKKKNGKMRPLGIPSFRDKLLQEVIRNFLEAIYEPTFSDFSHGFRPKRSCHTALEQAKLYFRGAKWFIEGDIKGCFDDIDHDKLIEILQRKIKDSRFINVIRSFLKAGYMEDWKYHQTYSGCPQGGILSPILANIYLNELDNEIAKIKQAFDKPATRKITPEHSSLSAKLFKRRKKLKSATGEQRTALLSEIHDLEEQYRKTPSKMQDDKKVSYVRYADDFLIAENGSKEDCVRLKEQLAKFLFDEYKLTLSKDKTLITHSSERVRFLGYDISVRRNQEYMTDSRGRKARHLNNTVALSVPFEKIEKHMFEKGFVRQTEAKKFRPLHKKGWLYLPDAEIVERYNAEIRGIVNYYYLASNLYKLQYFAYLMEYSCLATLAGKHNSTIKKIVAKHKQGKDWAIKYKTENGATKEKRIVKLKDCKGKCEDKIVQHRYSVNTNATIRARLQAGICELCGSKDKASYEVHHVPSVKGLDGTSLWEQIMKSKRRKTLVVCEDCHKAIHDD

SEQ ID NO: 394 - protein, 591 aa, Petroclostridium xylanilyticum
MKPTAEILERINKNSNEHKDGVYTRLYRYLLREDIYYSAYQKLYSNKGASTEGIDNDTADGFGKKYVESSIEELSNNTYKPKPVRREYIKKSNGKMRPLGIPSFRDKLLQEVMRRFLEAIYEPIFSDFSHGFRPNRSCHTALKQTLPYFKGARWFIEGDIKGCFDNIDHDKLIEILQRKIKDSKFINIIRSFLKAGYIEDFRYNQTYSGTPQGGILSPILANIYLNELDNKIMEIKQNFDKPATRCVNPTYDEIRGKRYWLQQKLKNATDEEKPVLISRINEYSKKLLKLPYKSQTDKNIAFVRYADDFLIAVRGNKEDCIKIKEQLREFLNDELKLTLSDEKTLITHSSEKVRFLGYDISVRRNQQISTNSLGHKKRQLNGTVELLVPLEKIEKFMFDKGIIRQSKAKKFHPIHRKGWLYLPDQEILERYNAEIRGILNYYHLANNYNKLNYFQYLMEYSCLATLAGKHNSSISKVIDKYKSGKGWAIKYKTEKGKTREKRIVKLQDCKGFCDDNIVRHIYSVNTNATIRARLQAGVCELCGSRGKSNYEVHHVSSVKGLEGNKLWEQIMKIKNRKTLVVCEDCHKAIHS

SEQ ID NO: 395 - protein, 297 aa, unidentified
  source 1..297: note = 19533
LERALQQMRERADWRYLQSETQYVPWRAPGVDNMTLAYAADHLDEIITQRLERLSCLPYGPLPAKRYYIEEGSKQRPIAIMTVPDGIVSRALLELVREPLEEPLPPCNFAYLQGIGPQRRVDHITSMVEQYGWVVQLDIRSYFDSIPHDLLYERIDRLIVDPDLLALLWEFVTQPIRENGCDHATTVGVPQGGVISPVLANLYLSPLDEAMLAEGWGYARYADDFVIFTSTKAEARRARDYATEIIAELGLQVHRTGRKQAIIAKDCDGFEFCGHFYKWYGDRVYVAPRRSKIEEVV

SEQ ID NO: 396 - protein, 326 aa, Buchananella hordeovulneris
METSVRHLGELTYPLRASAAFQRQALTGEPDLLTEIAAPDSLLNAWRYVFTRDAKDGYLLQQSQQIAADPDRFVAALSGALLSGRYQPEPQVEVLIPKKGKTSAMRELSIPSIRDRVVERAVLNAIIDRADLLQCSASFAFRRGLGVQAATHEITQLRDSGNRYVLLTDIANYFGRINIADSLRVLQRGLFCSRTLALLRFIAKPRRVVGRRRIRSRGLAQGSCLSPLLANLALTDIDFALADTGVGYVRFADDILLCAPSRTELAASQRLLASLAAHQGLQLNEEKTMHTSFDAGFCYLGVDFTAHQPVTDLHYGVKHTKQPAKV

SEQ ID NO: 397 - protein, 329 aa, Pseudomonas aeruginosa
WFADEPRHTRGGSRMADLYRQVRLMKTLSSAWRVVRASCMQSSSSEIRNEAIEFEADSFRQLKSIQSKLQKKKFEFLPQHGIAKKRPGKSSRPLVIAPIPNRIVQRAILDVLQDNVAYVQEILKVETSFGGIKGKNVALAIAAINKAFSNGVTHYVRSDIPSFFTKVQRAKVVDALAKNIDDVDMVNLFSAAIETTLGNLTDLQRRGLESIFPLSHDGVAQGSPLSPLIANIYLAEFDREMNREGLACIRYIDDFVIMAASEKQVMKGFRAAKAVLRRQGLQVYSPDDDPLKASKGDVRDGFDFLGCYVKPGLVQPSKFARNRLLEKID

SEQ ID NO: 398 - protein, 311 aa, Ischerella sp.
ATYDNFLLAWQRTVNTTSRMIRDELGMKIFAHNLQTNLEYLVQQVKAKDFPYKPLADHKVYVPKPSTTLRTMSLMAVSDVIIYQALVNIIADKAYSYLVTHENQCVLGNIYSGPGKRWMLRPWKKQYTRFVDCIENLYHAGNPWIASTDIVAFYDTIDHARLLSLIRKYCGDDQQFQELLQECLAKWAVHNSNITMGRGIPQGSNASDFLANLFLYEIDKEMIVNGYHYIRYVDDVRILASDKSTVQRGLILFDLELKRAGLVAQVTKTSVHEIEDIETEISRLRFIITAPTRNGNCLLVTLPSLPKSEQA

SEQ ID NO: 399 - protein, 324 aa, Arthrobacter sp.
DAEYLKSVWKSDIRPLLRQAKFSNSRYAIDPLHYAAYEWNLDAFVDGIVRDLKLHQFTPERGEVIRAAKGTGLTRPVCELSPRDALVYTAIVKRVEDQLLVSSRKWVGHTRSDKGSSVETGDGAVDSFDWFQFWLRRQGLIADILEIDGVKFIVESDISNFFPSIRLEHVREHLLAHTRLSKELVRLCMQMIDGVLPRSNYLDYSHLGLPQGNNDSSRAIAHSFLAPIDQEFDVEGLAGRYTRYMDDVLYGVRHVAEGEKIISRLQRSLESLALTPNSAKTKIVPVDEYLRDSMVESNAEIERIQSLLESSGALGGSTEPEAKL

SEQ ID NO: 400 - protein, 281 aa, Prevotella sp.
AVWENIVEAERISTNRKMRNPGVIRHIGNRWRNLIEIQQFVLNGTMRTDEYQHEQRVSGQDKLRDIAKLHFHPSHIQHQLITMAGNRRIDRSLIRHTYASRKGYGQILCATEMKKSLSKYRRTERWYGQGDVCKYYDNIPHSLIREDLERLFKDKKFVDTFMEPFERFAPEGKGIPLGIRPSQSIGNLTLKDFDHFMTEENKCADYKRYLDDFMFTGATKGEVKRKMKRAIKYLHDLGFNTHEPKIHRISEGMDMLGFVYYGVKNDMWWRKSDKKRWLRHR

SEQ ID NO: 401 - protein, 326 aa, Gimesia maris
AYDYYLHRKEKRDQKSGKSSNVITLKQIADHEYLLYCFQELRRYGGLGAGKDDISYFDISTSDCAKVFRKLSESLLRGRYRPQFPRKVPIPKPGTDEKRTLKINSIFDRSVSMALDKTLAPQLEKLFLEGSYGNRTNRSPWKMLAQLKKTVEETGRWVLAIEDIRKAFDNVKVKDIVKTHQQAQLELKEKHGIKINDSVVNLISTIAKGVTQKRKKGIDQGSNYSPQSLNVLLHYIHDVPLNAEVAFPLWYRYVDNLTYLCKSVSEGQRVLIKVRQVLNSASLKLKGEDGIVDLRKTTSSLLGFKLRRSNNQLIYLIAPRSWENLK

SEQ ID NO: 402 - protein, 319 aa, Thermoanaerobacterium sp.
SYFYKERRGKIYESYYGSIVTYNTTTSKMADSKELFSSFFKARMSLKKEFPYDEIAIKLFEYNLEDNINRFSKEILKGYKFNTDFIGYKVPKNEKDDRQKVMDNIFNTIAGASFLDIIGIVIDREFSSNCCGNRLNKKLNTEYSYEYFWYGWYYKFMKKAFNKVLNKNNYYLKLDIKSFYTNINQNILYDKIIKLIPYKDSRLKEFINSLIKRHIPYVNNGKGLPQGSLTSGFLANLYLDDFDKYFISKTNDGYMRYVDDIFIFGKTEEQIKELGKEAENKLKDLYLEINKEKTSMGDKSSLKNIYYDDKELDDFQKRL

SEQ ID NO: 403 - protein, 307 aa, Methylobacterium sp.
ARLEAEGQHRQAKRLNRMYCKSFDTKLVAATDANKRLPAGQRAKRAELHEIAAGMDLRQTQGTATFRAEPKKKGYRPVVNFDLRGRTAQLVLKRAAKPFIKIRPDQYASDGGQPAACHRIIELAAQGYAWFEEIDVRSFYASIIPEGVTELLGDLPKEMTEANTLAKRVRASFMKTARDIPSDDLCKLRNEVRAGIPQGSALSPLVAEAVMSNVLDQATQGADWPDVQLVVFADNIAVLGRTKADVEDAAENLAGAFSRSQLGPFNLHRKPARSINQGFDFLSTRFIARNRRIRAEVAPAARLKRIH

SEQ ID NO: 404 - protein, 393 aa, Photorhabdus sp.
MPKGFSFKDTFTPIQRKESLIGLLGIKDIEKFESLLRDGVENAYYIKPPIKKKNGGERIVYAPNRMLKSILRKINNRIFNQINFPDYLYGSIPDKENPRDYILCAHQHCKAKILIKLDIENFFPTMKTKFVFNIFKDLFKFSDEVSNILTKLTTYDGFVPQGAPTSTYLANLYFYDCEPNKVNYLRSLGFRYTRLIDDITVSRLKKEGDWKFVETIISEFITQKELSVNKDKTQLLSANSPQSFKVHGLCIEETTPRFTKNERINIKTQVKRVVKTGYNRDNIRMQKNYHDVYFSVKGKITKLKRVNCPDYPLLKKLLAKHCDPLPEHKEIKRINRVISNLSKDHATFGSTERYRSRYFQVIFRLEILKKLYPVEANEFKARLKLISPIKNEN

SEQ ID NO: 405 - protein, 263 aa, Acinetobacter sp.
IYKGSKIDSLDKLSEVLSIDIDELTNVLLLEDEAKYKAGFIKKSNGKLRNIYNPNTSLRKIQRRIKNRIFTQQIEWPDYIFGSIPADEISSNDYVASAEKHCGARALLKLDIEDFFDNITQELVEKIFKNFFKYNDELSKILAQLCCVDGKVPQGGITSSYIASLALFSIEERLFFRLKNKKLIYTRYIDDITISSKNSEYNFDSIIKIVEGQLNSIDLPLNIDKIKVERFSSKALKVHNIRVDLKTPKFDKIEVKNIRAAIH

SEQ ID NO: 406 - protein, 255 aa, Oenococcus oeni
TQLNVDELASFVGTNAQTIQTITNKTTSYYKSFELKKRSGGSRTILAPKQQLLSIQKKIATTLEKIYPVSIYSHGFIYKKGIKTNAEEHLRSTELLNFDIDNFFDNIPEYRIFGIFRYYFNMNNYISGILKELTCVERHLPQGAPSSPILSNIICYKIDKDLGKLARRNHCKYTRYVDDITFSSKRKLPSSIYNRINKSCSNNIVKILSDSGFTINHRKTRLLTKSQRQEVTGITTNKQLNVSKTYIRSTRAMLY

SEQ ID NO: 407 - protein, 331 aa, Deltaproteobacteria bacterium
RWDESKKRRAENKKKREAENKQRREAWDIYRKKTVVHAGEGVSSGLQDVLSDTDALVARGLPVMHCAADVAVMLGLPLPTLRWLTFHRRATALVHYHRFDIPKKTGGRRLISAPKATLKKAQQVVLDNILSRLPTEPEAHGFVAQHSIVTNAACHAGKAVVINVDLKDFFPSIGFRRVRGLFQRLGYSGQVATMLGLLCTEPPRIKAELDGKVFHVALGERVLPQGACTSPAITNTICRRLDRRLVGLASKHGFTYSRYADDLTFSGNVPKKAGRLLRSVRAILENEGFAENGKKTRVMRQSRRQEVTGLTVNDKPRVSREQRRELRAILH

SEQ ID NO: 408 - protein, 374 aa, Hungatella hathewayi
LVETFGSINNIKNALLDYFEYYECEKNKELVIMSILIRKELCTLDLASPFEYSIIDVIGSMSYFIEKLKTRVAFHQNYERLRYAPIKRWRARKRFSAYELFGMDIMEMRQMQSLFGYNKKKSVISKNLLINGKKRKIKMYSCTSEGFALRSFHLKLMKQLQKLIELQPYSYAYRKDRSIFMCMNQHIDSKFFLKIDIKDFFNSISKGKMNKILKCHFCYDSKQAYEDNVIRRRSRYLGEYVKEWLGIKEITDICFVNGRLALGMVTSPILSNIYMDFFDERFHDNYPGLIYTRYSDDILISSGKWFDYKSILNFIAKELCYLELEINEHKVGFYKLKQAGDHIKFLGLNIVQGPEENYITVGKQYIKDVCSNIS

SEQ ID NO: 409 - protein, 284 aa, Brucella anthropi
YRSYDIKNIEEVKVRLLQAENYTKSIESSLKFNIAHTKGRALYFPQDYETEIIIRKANTNIKKILGINPVSRNDIIRHLKEILREGVPYVIGRYDIKRFYDNIKISALNQNLDESLSTTYDTRRLVSGFLSSHEALYSSGLPTGISLSATLSELYLRNFDRGIKALPWVRYFARYVDDIIIIAEPRTTAQLMESALISGLPDGLALNSGKDKRYFRKLERDFGGAGPEADFDYLGYRFKVDKILKKSSDCGTLASRKVTVDISEKKVKIRKTRFIYAVHKYLAD

SEQ ID NO: 410 - protein, 312 aa, Leptospira meyeri
KGKKEKKKGAFFSSIEEVKKLKFDFVVSRISAHTKSDLLVEPTGYYDLEWFVKNRRSDLFNVIHSFYSPSKKITLNMPKGNFSYRPVSYLLPMDSLIYLAVTEKLIFYTKDKFSKFVYSNLLNPFDKKEVFSEPVKHWLRMRNTIRSNYKTNSLDKYYSADISGYFENIKIKYLLKKAKFYIGKHEVSYTKYLKKLLEKWQYADSQGLIQPHPASSILGKIYLSPVDSYFSYLGKRYSRYVDEFHIQTDDLSEMLNITIHLNEQLRELGLNLNSKKTIFKIGKDIWDEINENQDFFSAVDYAQRIRKKDELA

SEQ ID NO: 411 - protein, 310 aa, Turneriella parva
SGTPESKQSQPGGRKPPLMCHPAITYDAMCSLAGLQRAQISLIEELKRRGEGSKHALSYEDLTELGALLRSHQYSHRPCRLMTIKVGSKKRDIDSPDWLDRIVQRTYVDTIYPLVQQMACDSSHAYLYKRSIHTALWRLIMNIEHFGYSHVFRTDIESFFDSIPHAEMERVIDLHIRDIELNAFSHELLRVAEGFKNSKVGLPTGWLIPPLWANMLLTPVDARLESAGLKFFRYGDDYGILQRSKQEAEFAQGLLESALKPLGLHLKPGYSHKTYTRKLEDGLIVLGHEIRRINNRLTVAISKNSLAETR

SEQ ID NO: 412 - protein, 278 aa, Bacteroides sp.
CIGDIESAAWRAFRGHSRKPEVRAFQESMSSNCAFLYDSLRDGSWQNLMVYRQLTKTNNNGKVRQIDSPSLVVRIYQHLLLNLLEPHYFRKDNLNGLNCKPGCGITSAIPSRSVIHRLKHIFYDRRDLHYCLTIDQRQCYDHITPKVFRKALKQMVDDKWLVDFAVDVCFVDGRLPIGTPTSPFVHHVVMLEFDYFVKSLSSASVRYADDNFLAFATKEEAQAAKWRIKNWWWFRLGMRAKRGSAVVRPLSEPCDFCGYVFHRVDGMGICDHNKGYVK

SEQ ID NO: 413 - protein, 324 aa, Tetraodon nigroviridis
RAARNNSAPGPNGVPYLVYKRCPKLLARLWKILRVIWRRGKVAHQWRWAEGVWVPKEEKSTLIEQFRTISLLNVEGKIFFSILSHRLSDFLLKNQYIDSSVQKGGIPGVPGCLEHCGVVTQLIREAREGRGSLAVLWLDLANAYGAIPHKLVEMALARHHVPCSIKTLIMDYYDSFHLRFVTSGSVTSEWHRLEKGIITGCTISVIIFALAMNMLAKSAEPECRGPITKSGIRQPPIRAFMDDLTVTTTSVPGCRWILQGLERLMTWARMRFKPGKSRSLVLKAGKVTDRFRFYLGGTQIPSVSEKPVKSLGKMFDGSLKYAFS

SEQ ID NO: 414 - protein, 338 aa, Bacteroides stercoris
QVDWDEINEMLYERQWQKLGRGASTKTRIAQDKTIIDLREMSVNGTRLNLDTALKNLRRDMIDDWFFDPLQYVDLCNQDFVLDYFSSQDVREHYKFQEMEVLYIPKESLVQRKAMVGNFVDRLLYIAIVEKLAPLMEEYISSRVYAARLNRSEDNSLIANGVNQWIKMNYLIDEWLEKGVGCLFKCDVVNYFDNISHATLIGFLREIATDADALNAIKMLEQMFSEISDSQTNCGLPQNSDASSLLATFYLSHVDIQIQAQAIEYCRFMDDIYFMAPDYFSARNVLQSLEGELRRLNLCLNSSKVVCITLENKKEVDEFREGLSLYNHTNQKIKQLIR

SEQ ID NO: 415 - protein, 357 aa, Magnetoovum chiemensis
IAFIHPKNNEKANAHWEYYRDFLHDTDRFAESIATIPLDEFKLLYEKAYWHQKIEFPAIDYIWRTIQGASNDKIEYLEYSLNYAFQSWYSGKFIDKGLEYSIPKQNPKKERRKVLLSPIDSIVEMKIIADIGPEIENIIDAKFRQGGPVSLGNRLDLKENSLVKKRNLFKYWPKQFRLRYFTILQQIQDKTDGYIVNIDVSDFYPSIPHQEMMKIIEKYLPKLSNFQKHWINDFLKTGEMSKDDGKGIPQGPPLSHVLANLYLYDKLDSKIIHGFLPKFYTRYVDDIVYVASSKKDAETFYKWIDHVINPLVKNKDKSYIVSNSEYLNTYKQHEIIELIRIKVEQVIQKVYLIAKIL

SEQ ID NO: 416 - protein, 275 aa, unidentified
  source 1..275: note = PE2d497
KEPDVSLGSTWLSDFPQAWAETGGMGLAVRQAPLIIPLKATSTPVSIKQYPMSQEARLGIKPHIQRLLDQGILVPCQSPWNTPLLPVKKPGTNDYRPVQDLREVNKRVEDIHPTVPNPYNLLSGLPPSHQWYTVLDLKDAFFCLRLHPTSQPLFAFEWRDPEMGISGQLTWTRLPQGFKNSPTLFNEALHRDLADFRIQHPDLILLQYVDDLLLAATSELDCQQGTRALLQTLGNLGYRASAKKAQICQKQVKYLGYLLKEGQRWLTEARKETVM

SEQ ID NO: 417 - protein, 677 aa, Murine leukemia virus
TLNIEDEYRLHETSKEPDVSLGSTWLSDFPQAWAETGGMGLAVRQAPLIIPLKATSSPVSIKQYPMSQEARLGIKPHIQRLLDQGILVPCQSPWNTPLLPVKKPGTNDYRPVQDLREVNKRVEDIHPTVPNPYNLLSGLPPSHQWYTVLDLKDAFFCLRLHPTSQPLFAFEWRDPEMGISGQLTWTRLPQGFKNSPTLFDEALHRDLADFRIQHPDLILLQYVDDLLLAATSENDCQQGTRALLQILGDLGYRASAKKAQICQKQVKYLGYLLKEGQRWLTEARKETVMGQPIPKTPRQLREFLGTAGFCRLWIPGFAEMAAPLYPLTKTGTLFNWGPDQQKAYQEIKQALLTAPALGLPDLTKPFELFVDEKQGYAKGVLTQRLGPWRRPVAYLSKKLDPVAAGWPPCLRMVAAIAVLTKDAGKLTMGQPLVVLAPHAVEALVKQPPDRWLSNARMTHYQALLLDTDRVQFGPVVALNPATLLPLPEEGLRHDCLDILAEAHGTRPDLTDQPLPDADHTWYTDGSSFLQEGQRKAGAAVTTETEVIWAKALPSGTSAQRAELIALTQALKMAEGKKLNVYTDSRYAFATAHIHGEIYRRRGLLTSEGKEIKNKGEILALLKALFLPKRLSIIHCPGHQKGNSAEARGNRMADQAAREIASKETPETSTLLIENSTP

SEQ ID NO: 418 - protein, 677 aa, Murine leukemia virus
TLNIEDEYRLHETSKEPDASLESTWLSDFPQAWAETGGMGLAVRQAPLIIPLKATSTPVSIKQYPMSQEARLGIKPHIQRLLDQGILVPCQSPWNTPLLPVKKPGTNDYRPVQDLREVNKRVEDIHPTVPNPYNLLSGLPPSHQWYTVLDLKDAFFCLRLHPTSQPLFAFEWRDPEMGISGQLTWTRLPQGFKNSPTLFDEALHRDLAGFRIQHPDLILLQYVDDLLLAATSENDCQQGTRALLQILGDLGYRASAKKAQICQKQVKYLGYLLKEGQRWLTEARKETVMGQPIPKTPRQLREFLGTAGFCRLWIPGFAEMAAPLYPLTKTGTLFNWGPDQQKAYQEIKQALLTAPALGLPDLTKPFELFVDEKQGYAKGVLTQRLGPWRRPVAYLSKKLDPVAAGWPPCLRMVAAIAVLTKDAGKLTLGQPLVVLAPHAVEALVKQPPDRWLSNARMTHYQALLLDTDRVQFGPVVALNPATLLPLPEEGLRHDCLDILAEAHGTRPDLTDQPLPDADHTWYTDGSSFLQKGQRKAGAAVTTETEVIWAKALPSGTSAQRAELIALTQALKMAEGKKLNVYTDSRYAFATAHIHGEIYRRRGLLTSEGKEIKNKGEILALLKALFLPKRLSIIHCPGHQKGNSAEARGNRMADQAAREIASKETPETSTLLIENSTP

SEQ ID NO: 419 - protein, 677 aa, Cas-Br-E murine leukemia virus
TLNIEDEYRLHETSKEPDVSLGSTWLSDFPQAWAETGGMGLAVRQAPLIIPLKATSTPVSIKQYPMSQEARLGIKPHIQRLLDQGILVPCQSPWNTPLLPVKKPGTNDYRPVQDLREVNKRVEDIHPTVPNPYNLLSGLPPSHQWYTVLDLKDAFFCLRLHPTSQPLFAFEWRDPEMGISGQLTWTRLPQGFKNSPTLFDEALHRDLAGFRIQHPDLILLQYVDDLLLAATSELDCQQGTRALLQTLGDLGYRASAKKAQICQKQVKYLGYLLKEGQRWLTEARKETVMGQPIPKTPRQLREFLGTAGFCRLWIPGFAEMAAPLYPLTKTGTLFNWGPDQQKAFQEIKQALLTAPALGLPDLTKPFELFVDEKQGYAKGVLTQKLGPWRRPVAYLSKKLDPVAAGWPPCLRMVAAIAVLTKDAGKLTMGQPLVILAPHAVEALVKQPPDRWLSNARMTHYQALLLDTDRVQFGPVVALNPATLLPLPEEGLQHDCLDILAEAHGTRSDLMDQPLPDADHTWYTDGSSFLQEGQRKAGAAVTTETEVIWARALPAGTSAQRAELIALTQALKMAEGKKLNVYTDSRYAFATAHIHGEIYRRRGLLTSEGKEIKNKDEILALLKALFLPKRLSIIHCPGHQKGNSAEARGNRMADQAAREVATRETPETSTLLIENSTP

SEQ ID NO: 420 - protein, 677 aa, Rauscher murine leukemia virus
TLNIEDEYRLHETSKEPDVSLGSTWLSDFPQAWAETGGMGLAVRQAPLIIPLKATSTPVSIKQYPISQEARLGIKPHIQRLLDQGILVPCQSPWNTPLLPVKKPGTHDYRPVQDLREVNKRVEDIHPTVPNPYNLLSGLPPSHQWYTVLDLKDAFFCLRLHPTSQSLFAFEWRDPEMGISGQLTWTRLPQGFKNSPTLFDEALHRDLADFRIQHPDLILLQYVDDLLLAATSELDCQQGTRALLQTLGDLGYRASAKKAQICQKQVKYLGYLLKEGQRWLTEARKETVMGQPTPKTPRQLREFLGTAGFCRLWIPGFAEMAAPLYPLTKTGTLFNWGPDQQKAYQEIKQALLTAPALGLPDLTKPFELFVDEKQGYAKGVLTQKLGPWRRPVAYLSKKLDPVAAGWPPCLRMVAAIAVLTKDAGKLTMGQPLVILAPHAVEALVKQPPDRWLSNARMTHYQALLLDTDRVQFGPIVTLNPATLLPLPEEGLQHDCLDILAEAHGTRPDLTDQPLPDADHTWYTDGSSFLQEGQRKAGAAVTTETEVIWAKALPAGTSAQRAELIALTQALKMAEGKKLNVYTDSRYAFATAHIHGEIYRRRGLLTSEGKEIKNKDEILALLKALFLPKRLSIIHCPGHQKGNRAEARGNRMADQAAREVATRETPETSTLLIENSTP

SEQ ID NO: 421 - protein, 677 aa, Friend murine leukemia virus
TLNIEDEYRLHETSKGPDVPLGSTWLSDFPQAWAETGGMGLAVRQAPLIIPLRAASTPVSIKQYPMSREARLGIKPHIQRLLDQGILVPCQSPWNTPLLPVKKPGTNDYRPVQDLREVNKRVEDIHPTVPNPYNLLSGLPPSHQWYTVLDLKDAFFCLRLHPTSQSLFAFEWRDPEMGISGQLTWTRLPQGFKNSPTLFDEALHRDLADFRIQHPDLILLQYVDDLLLAATSELDCQQGTRALLQTLGDLGYRASAKKAQICQKQVKYLGYLLKEGQRWLTEARKETVMGQPTPKTPRQLREFLGTAGFCRLWIPGFAEMAAPLYPLTKTGTLFKWGPDQQKAYQEIKQALLTAPALGLPDLTKPFELFVDEKQGYAKGVLTQKLGPWRRPVAYLSKKLDPVAAGWPPCLRMVAAIAVLTKDAGKLTMGQPLVILAPHAVEALVKQPPDRWLSNARMTHYQALLLDTDRVQFGPIVTLNPATLLPLPEEGLQHDCLDILAEAHGTRPDLTDQPLPDADHTWYTDGSSFLQEGQRKAGAAVTTETEVIWAKALPAGTSAQRAELIALTQALKMAEGKKLNVYTDSRYAFATAHIHGEIYRRRGLLTSEGKEIKNKEEILALLKALFLPKRLSIIHCPGHQKGNRAEARGNRMADQAAREVATRETPETSTLLIENSAP

SEQ ID NO: 422 - protein, 677 aa, Friend murine leukemia virus
TLNIEDEYRLHETSKGPDVPLGSTWLSDFPQAWAETGGMGLAVRQAPLIIPLKATSTPVSIKQYPMSQEARLGIKPHIQRLLDQGILVPCQSPWNTPLLPVKKPGTNDYRPVQDLREVNKRVEDIHPTVPNPYNLLSGLPPSHQWYTVLDLKDAFFCLRLHPTSQSLFAFEWRDPEMGISGQLTWTRLPQGFKNSPTLFDEALHRDLADFRIQHPDLILLQYVDDLLLAATSELDCQQGTRALLQTLGDLGYRASAKKAQICQKQVKYLGYLLKEGQRWLTEARKETVMGQPTPKTPRQLREFLGTAGFCRLWIPGFAEMAAPLYPLTKTGTLFEWGPDQQKAYQEIKQALLTAPALGLPDLTKPFELFVDEKQGYAKGVLTQKLGPWRRPVAYLSKKLDPVAAGWPPCLRMVAAIAVLTKDAGKLTMGQPLVILAPHAVEALVKQPPDRWLSNARMTHYQALLLDTDRVQFGPIVALNPATLLPLPEEGLQHDCLDILAEAHGTRPDLTDQPLPDADHTWYTDGSSFLQEGQRKAGAAVTTETEVVWAKALPAGTSAQRAELIALTQALKMAEGKKLNVYTDSRYAFATAHIHGEIYRRRGLLTSEGKEIKNKDEILALLKALFLPKRLSIIHCPGHQKGNRAEARGNRMADQAAREVATRETPETSTLLIENSAP

SEQ ID NO: 423 - protein, 677 aa, Friend murine leukemia virus
TLNIEDEYRLHETSKGPDVPLGSTWLSDFPQAWAETGGMGLAFRQAPLIISLKATSTPVSIKQYPMSQEARLGIKPHIQRLLDQGILVPCQSPWNTPLLPVKKPGTNDYRPVQDLREVNKRVEDIHPTVPNPYNLLSGLPPSHQWYTVLDLKDAFFCLRLHPTSQSLFAFEWKDPEMGISGQLTWTRLPQGFKNSPTLFDEALHRDLADFRIQHPDLILLQYVDDLLLAATSELDCQQGTRALLQTLGDLGYRASAKKAQICQKQVKYLGYLLKEGQRWLTEARKETVMGQPTPKTPRQLREFLGTAGLCRLWIPGFAEMAAPLYPLTKTGTLFKWGPDQQKAYQEIKQALLTAPALGLPDLTKPFELFVDEKQGYAKGVLTQKLGPWRRPVAYLSKKLDPVAAGWPPCLRMVAAIAVLTKDVGKLTMGQPLVILAPHAVEALVKQPPDRWLSNARMTHYQALLLDTDRVQFGPIVALNPATLLPLPEEGLQHDCLDILAEAHGTRPDLTDQPLPDADHTWYTDGSSFLQEGQRRAGAAVTTETEVIWAKALPAGTSAQRAELIALTQALKMAAGKKLNVYTDSRYAFATAHIHGEIYRRRGLLTSEGKEIKNKDEILALLKALFLPKRLSIIHCPGHQKGNHAEARGNRMADQAAREVATRETPETSTLLIENSAP

SEQ ID NO: 424 - protein, 677 aa, Xenotropic murine leukemia virus-related virus
TLNIEDEYRLHETSKEPDVPLGSTWLSDFPQAWAETGGMGLAVRQAPLIIPLKATSTPVSIKQYPMSQEARLGIKPHIQRLLDQGILVPCQSPWNTPLLPVKKPGTNDYRPVQDLREVNKRVEDIHPTVPNPYNLLSGLPPSHQWYTVLDLKDAFFCLRLHPTSQPLFAFEWRDPEMGISGQLTWTRLPQGFKNSPTLFDEALHRDLADFRIQHPDLILLQYVDDLLLAATSEQDCQRGTRALLQTLGNLGYRASAKKAQICQKQVKYLGYLLKEGQRWLTEARKETVMGQPTPKTPRQLREFLGTAGFCRLWIPGFAEMAAPLYPLTKTGTLFNWGPDQQKAYQEIKQALLTAPALGLPDLTKPFELFVDEKQGYAKGVLTQKLGPWRRPVAYLSKKLDPVAAGWPPCLRMVAAIAVLTKDAGKLTMGQPLVILAPHAVEALVKQPPDRWLSNARMTHYQAMLLDTDRVQFGPVVALNPATLLPLPEKEAPHDCLEILAETHGTRPDLTDQPIPDADYTWYTDGGSFLQEGQRRAGAAVTTETEVIWGGVLPAGTSAQRAELIALTQALKMAEGKKLNVYTDSRYAFATAHVHGEIYRRRGLLTSEGREIKNKNEILALLKALFLPKRLSIIHCPGHQKGNSAEARGNRMADQAAREAAMKAVLETSTLLIEDSTP

SEQ ID NO: 425 - protein, 588 aa, Moloney murine leukemia virus
PHIQRLLDQGILVPCQSPWNTPLLPVKKPGTNDYRPVQDLREVNKRVEDIHPTVPNPYNLLSGLPPSHQWYTVLDLKDAFFCLRLHPTSQPLFAFEWRDPEMGISGQLTWTRLPQGFKNSPTLFDEALHRDLADFRIQHPDLILLQYVDDLLLAATSELDCQQGTRALLQTLGNLGYRASAKKAQICQKQVKYLGYLLKEGQRWLTEARKETVMGQPTPKTPRQLREFLGTAGFCRLWIPGFAEMAAPLYPLTKTGTLFNWGPDQQKAYQEIKQALLTAPALGLPDLTKPFELFVDEKQGYAKGVLTQKLGPWRRPVAYLSKKLDPVAAGWPPCLRMVAAIAVLTKDAGKLTMGQPLVILAPHAVEALVKQPPDRWLSNARMTHYQALLLDTDRVQFGPVVALNPATLLPLPEEGLQHNCLDILAEAHGTRPDLTDQPLPDADHTWYTDGSSLLQEGQRKAGAAVTTETEVIWAKALPAGTSAQRAELIALTQALKMAEGKKLNVYTDSRYAFATAHIHGEIYRRRGLLTSEGKEIKNKDEILALLKALFLPKRLSIIHCPGHQKGHSAEARGNRMADQAARKAAITE

SEQ ID NO: 426 - protein, 676 aa, Murine leukemia virus
TLNLEDEYRLYETSAEPEASPGSTWLSDFPQAWAETGGMGLAVRRRPLIIPLNATSTPVSIKQYPMSQEARLGIKPHIQRLLDQGILVPCQSPWNTPCLPVKKPGTNDYRPVQDLREVNKRVEDIHPTVPNPYNLLSGLPPSHRWYTVLDLKDAFFCLRLHPTSQPLFAFEWRDPGMGISGQLTWTRLPQGFKNSPTLFDEALHRDLADFRIQHPDLILLQYVDDILLAATSELDCQQGTRALLLTLGNLGYRASAKKAQLCQKQVKYLGYLLREGQRCLTEARKETVRGQPTPKTPRQLREFLGTAGFCRLWIPGFAEMAAPLYPLTKTGTLFNWGPDQQKAYQEIKQALLTAPALGLPDLTKPFELFVDEKQGYAKGSLTQKLGPWRRPVAYLSKKLDPVAAGWPPCLRMVAAIAVLRKDAGKLTMGQPLVILAPHADEALVKQPPDRWLSNARMTHYQAMLLDTDRVQFGPVVALNPSTFIPLPEEGAPHDCLEILAETHGTRPDLTDQPIPDADHTWYTDGSSFLQEGQRKAGAAVTTETEVIWARALPAGTSAQRELIALTQALKMAEGKRLNVYTDSRYAFATAHIHGEIYRRRGLLTSEGREIKNKSEILALLKALFLPKRLSIIHCLGHQKGDSAEARGNRLADQAAREAAINTPPDTSTLLIEDSTP

SEQ ID NO: 427 - protein, 677 aa, Radiation murine leukemia virus
TLNIEDEYRLHEISTEPDVSPGSTWLSDFPQAWAETGGMGLAVRQAPLIIPLKATSTPVSIKQYPMSQEAKLGIKPHIQRLLDQGILVPCQSPWNTPLLPVKKPGTNDYRPVQGLREVNKRVEDIHPTVPNPYNLLSGLPTSHRWYTVLDLKDAFFCLRLHPTSQPLFASEWRDPGMGISGQLTWTRLPQGFKNSPTLFDEALHRGLADFRIQHPDLILLQYVDDLLLAATSELDCQQGTRALLKTLGNLGYRASAKKAQICQKQVKYLGYLLREGQRWLTEARKETVMGQPTPKTPRQLREFLGTAGFCRLWIPRFAEMAAPLYPLTKTGTLFNWGPDQQKAYHEIKQALLTAPALGLPDLTKPFELFVDEKQGYAKGVLTQKLGPWRRPVAYLSKKLDPVAAGWPPCLRMVAAIAVLTKDAGKLTMGQPLVILAPHAVEALVKQPPDRWLSNARMTHYQAMLLDTDRVQFGPVVALNPATLLPLPEEGAPHDCLEILAETHGTEPDLTDQPIPDADHTWYTDGSSFLQEGQRKAGAAVTTETEVIWARALPAGTSAQRAELIALTQALKMAEGKRLNVYTDSRYAFATAHIHGEIYKRRGLLTSEGREIKNKSEILALLKALFLPKRLSIIHCLGHQKGDSAEARGNRLADQAAREAAIKTPPDTSTLLIEDSTP

SEQ ID NO: 428 - protein, 677 aa, Murine leukemia virus
TLGIEDEYRLHETSTEPDVSLGSTWLSDFPQAWAETGGMGLAVRQAPLIIPLKATSTPVSIQQYPMSHEARLGIKPHIQRLLDQGILVPCQSPWNTPLLPVKKPGTNDYRPVQDLREVNKRVEDIHPTVPNPYNLLSGLPPSHQWYTVLDLKDAFFCLRLHPTSQPLFAFEWRDPGMGISGQLTWTRLPQGFKNSPTLFDEALHRDLADFRIQHPDLILLQYVDDILLAATSELDCQQGTRALLQTLGDLGYRASAKKAQICQKQVKYLGYLLREGQRWLTEARKETVMGQPVPKTPRQLREFLGTAGFCRLWIPGFAEMAAPLYPLTKTGTLFSWGPDQQKAYQEIKQALLTAPALGLPDLTKPFELFVDEKQGYAKGVLTQKLGPWRRPVAYLSKKLDPVAAGWPPCLRMVAAIAVLTKDAGKLTMGQPLVILAPHAVEALVKQPPDRWLSNARMTHYQAMLLDTDRVQFGPVVALNPATLLPLPEEGAPHDCLEILAETHGTRPDLTDQPIPDADHTWYTDGSSFLQEGQRKAGAAVTTETEVIWAGALPAGTSAQRAELIALTQALKMAEGKRLNVYTDSRYAFATAHIHGEIYRRRGLLTSEGREIKNKSEILALLKALFLPKRLSIIHCLGHQKGDSAEARGNRLADQAAREAAIKTPPDTSTLLIEDSTP

SEQ ID NO: 429 - protein, 677 aa, Murine leukemia virus
TLNLEDEYRLYETSAEPEASPGSTWLSDFPQAWAETGGMGLAVRQAPLIIPLKATSTPVSIKQYPMSQEARLGIKPHIQRLLDQGILVPCQSPWNTPLLPVKKPGTNDYRPVQDLREVNKRVEDIHPTVPNPYNLLSGLPPSHRWYTVLDLKDAFFCLRLHPTSQPLFAFEWRDPGMGISGQLTWTRLPQGFKNSPTLFDEALHRDLAGFRIQHPDLILLQYVDDLLLAATSELDCQQGTRALLQTLGDLGYRASAKKAQICQKQVKYLGYLLKEGQRWLTEARKETVMGQPIPKTPRQLREFLGTAGFCRLWIPGFAEMAAPLYPLTKTGTLFNWGPDQQKAYQEIKQALLTAPALGLPDLTKPFELFVDEKQGYAKGVLTQKLGPWRRSVAYLSKKLDPVAAGWPPCLRMVAAIAVLTKDAGKLTMGQPLVILAPHAEEALVKQPPDRWLSNARMTHYQAMLLDTDRVQFGPVVALNPATLLPLPEEGAPHDCLEILAETHGTRPDLTDQPIPDADHTWYSDGSSFLQEGQRKAGAAVTTETEVIWARALPAGTSAQRAELIALTQALKMAEGKRLNVYTDSRYAFATAHIHGEIYRRRGLLTSEGREIKNKSEILALLKALFLPKRLSIIHCLGHQKGDSAEARGNRLADQAAREAAIKTPPDTSTLLIEDSTP

SEQ ID NO: 430 - protein, 677 aa, AKR murine leukemia virus
TLNLEDEYRLYETSAEPEVSPGSTWLSDFPQAWAETGGMGLAVRQAPLIIPLKATSTPVSIKQYPMSQEAKLGIKPHIQRLLDQGILVPCQSPWNTPLLPVKKPGTNDYRPVQDLREVNKRVEDIHPTVPNPYNLLSGLPPSHRWYTVLDLKDAFFCLRLHPTSQPLFAFEWRDPGMGISGQLTWTRLPQGFKNSPTLFDEALHRDLADFRIQHPDLILLQYVDDILLAATSELDCQQGTRALLLTLGNLGYRASAKKAQLCQKQVKYLGYLLKEGQRWLTEARKETVMGQPTPKTPRQLREFLGTAGFCRLWIPGFAEMAAPLYPLTKTGTLFNWGPDQQKAYQEIKQALLTAPALGLPDLTKPFELFVDEKQGYAKGVLTQKLGPWRRPVAYLSKKLDPVAAGWPPCLRMVAAIAVLRKDAGKLTMGQPLVILAPHAVEALVKQPPDRWLSNARMTHYQAMLLDTDRVQFGPVVALNPATLLPLPEEGAPHDCLEILAETHGTRPDLTDQPIPDADHTWYTDGSSFLQEGQRKAGAAVTTETEVIWARALPAGTSAQRAELIALTQALKMAEGKRLNVYTDSRYAFATAHIHGEIYRRRGLLTSEGREIKNKSEILALLKALFLPKRLSIIHCLGHQKGDSAEARGNRLADQAAREAAIKTPPDTSTLLIEDSTP

SEQ ID NO: 431 - protein, 678 aa, unidentified
  source 1..678: note = Recombinant M-MuLV/RaLV retrovirus
TLQLEDEYRLYEPEQDKPKSPEIDSWVTKFPLAWAETGGMGLALQQPPLIIQLKATATPVSIKQYPMSWEAYQGIKPHIRRLLDQGILVPCRSPWNTPLLPVKKPGTGDYRPVQDLREVNKRVEDIHPTVPNPYNLLSTLQTTHTWYTVLDLKDAFFCLRLSPESQPLFAFEWKDSEMGLSGQLTWTRLPQGFKNSPTLFDEALHRDLADFRVQHPTLILLQFVDDLLLGATSETACHQGTESLLQTLGRLGYRASARKAQICQTQVTYLGYQLRDGQRWLTPARKQTVANIPAPRNGRQLREFLGTAGFCRLWIPGFAEMAAPLYPLTKQGVLFQWGAEQQEAFDNIKRALLSSPALGLPDITKPFELFVDEKQGYAKGVLTQRLGPWKRPVAYLSKKLDPVASGWPPCLRMVAAIAVLTKDAGKLTLGQPLTILAPHAVEALIKQPPDCWLSNSRMTHYQALLLDAERVQFGPVVALNPATLLPLPEEAEQHDCLQILAEVHGTRPDLSDRPLQDADHTWYTDGSSYLVNGERKAGAAVTTEDKVIWASALPVGTSAQRAELIALTQALKMAEGKRLNVYTDSRYAFATAHIHGEIYRRRGLLTSEGKDIKNKTEILALLAALFLPKRLSIIHCPGHQKGHSPEARGNRLADVSAREAAMGTQVLSLKDQDQPTSP

SEQ ID NO: 432 - protein, 678 aa, unidentified
  source 1..678: note = Recombinant M-MuLV/RaLV retrovirus
TLQLEDEYRLYEPEQDKPKSLEIDSWATKFPLAWAETGGMGLALQQPSLIIQLKSTATPSSIKQYPMSWEAYQGIKPHIRRLLDQGILVPCRSPWNMPLLPVKKPGTGDYRPVQDLREVNKRVEDIHPTVPNPYNLLSTLPPTHTWYTVLDLKDAIFCLRLSPESQPLFAFEWKDSEMGLSGQLTWTRLPQGFKNSPMLFDEALHRDLADFRVQHPTLILLQFVDDLLLGATSETACHQGTESLLQTLGRLGYRASARKAQICQTQVTYLGYQLRDGQRWLTPARKQTVANIPAPRNGRQLREFLGTAGFCRLWIPGFAEMAAPLYPLTKQGVLFQWGAEQQEAFDNIKRALLSSSALGLPEITKPFELFVDEKQGYAKGVLTQRLGPWNHPVAYLSKKLDPVASGWPPCLRMVAAIAVLTKDAGKLTLGQPLTILAPHAVEALIKQPPGRWLSNSRMTHYQALLLDAEWVQFGPVVALNPATLLPLTEEAEQHDCLQILAEVHGIRPDLSDRPLQDADHTWYTDGSSYLVNGERKAGAAVTTEDKVIWASALPVGTSAQRAELIALTQALKMAEGKRLNVYTDRHYAFATAHIHGEIYQRRGLLTSEGKDIKNKTEIQALLAALFLPKRLRIIHCPGHQKGHSPEARGNRLADVSAPEAAMGTQVLFLKDQDQPTSP

SEQ ID NO: 433 - protein, 678 aa, unidentified
  source 1..678: note = Recombinant M-MuLV/RaLV retrovirus
PLQLEDEYRLYEPEQAKPKSLEIDSWVTKFPLAWAETGGMGLALQQPPLIIQLKATATPVSIKQYPMSWEAYQGIKPHIRRLLDQGILVPCWSPWNTPLLPVKKPGTGDYRPVQDLREVNKRVEDIHPAVPNPYNLLSTLPPTHTWYMVLDLKDAFFCLRLSPESQPLFAFEWKDSEMGLSGQLTWTRLPQGFKNSPTLFDEALHRDLADFRVQHPTLILLQFVDDLLLGATSETACHQGTESLLQTLGRLGYRASARKAQICQTQVTYLGYQLRDGQRWLTPARKQTVANIPAPRNGRQLREFLGTAGFCRLWIPGFAEMAAPLYPLTKQGVLFQWGAEQQEAFDNIKRALLSSPALGLPDITKPFELFVDEKQGCAKGVLTQRLGPWKCPVVYLSKKLDPVASGCSPCLRMVAAIAVLTKDAGKLTLGQPLTILAPHAVEALIKQPPDRWLSNSRMTHYQALLLDAEWVQFGPVVALNPATLLPLTEEAEQHDCLQILAEVHGIRPDLSDRPLQDADHTWYTDGSSYLVNGERKAGAAVTTEDKVIWASALPVGTSAQRAELIALTQALKMAEGKRLNVYTDRHYAFATAHIHGEIYQRRGLLTSEGKDIKNKTEIQALLAALFLPKRLRIIHCPGHQKGHSPEARGNRLADVSAPEAAMGTQVLFLKDQDQPTSP

SEQ ID NO: 434 - protein, 676 aa, Feline leukemia virus
TLQLEEEYRLFEPESTQKQEMDIWLKNFPQAWAETGGMGTAHCQAPVLIQLKATATPISIRQYPMPHEAYQGIKPHIRRMLDQGILKPCQSPWNTPLLPVKKPGTEDYRPVQDLREVNKRVEDIHPTVPNPYNLLSTLPPSHPWYTVLDLKDAFFCLRLHSESQLLFAFEWRDPEIGLSGQLTWTRLPQGFKNSPTLFDEALHSDLADFRVRYPALVLLQYVDDLLLAAATRTECLEGTKALLETLGNKGYRASAKKAQICLQEVTYLGYSLKDGQRWLTKARKEAILSIPVPKNSRQVREFLGTAGYCRLWIPGFAELAAPLYPLTRPGTLFQWGTEQQLAFEDIKKALLSSPALGLPDITKPFELFIDENSGFAKGVLVQKLGPWKRPVAYLSKKLDTVASGWPPCLRMVAAIAILVKDAGKLTLGQPLTILTSHPVEALVRQPPNKWLSNARMTHYQAMLLDAERVHFGPTVSLNPATLLPLPSGGNHHDCLQILAETHGTRPDLTDQPLPDADLTWYTDGSSFIRNGEREAGAAVTTESEVIWAAPLPPGTSAQRAELIALTQALKMAEGKKLTVYTDSRYAFATTHVHGEIYRRRGLLTSEGKEIKNKNEILALLEALFLPKRLSIIHCPGHQKGDSPQAKGNRLADDTAKKAATETHSSLTVLPTELIEG

SEQ ID NO: 435 - protein, 675 aa, Baboon endogenous virus
TVSLQDEHRLFDIPVTTSLPDVWLQDFPQAWAETGGLGRAKCQAPIIIDLKPTAVPVSIKQYPMSLEAHMGIRQHIIKFLELGVLRPCRSPWNTPLLPVKKPGTQDYRPVQDLREINKRTVDIHPTVPNPYNLLSTLKPDYSWYTVLDLKDAFFCLPLAPQSQELFAFEWKDPERGISGQLTWTRLPQGFKNSPTLFDEALHRDLTDFRTQHPEVTLLQYVDDLLLAAPTKKACTQGTRHLLQELGEKGYRASAKKAQICQTKVTYLGYILSEGKRWLTPGRIETVARIPPPRNPREVREFLGTAGFCRLWIPGFAELAAPLYALTKESTPFTWQTEHQLAFEALKKALLSAPALGLPDTSKPFTLFLDERQGIAKGVLTQKLGPWKRPVAYLSKKLDPVAAGWPPCLRIMAATAMLVKDSAKLTLGQPLTVITPHTLEAIVRQPPDRWITNARLTHYQALLLDTDRVQFGPPVTLNPATLLPVPENQPSPHDCRQVLAETHGTREDLKDQELPDADHTWYTDGSSYLDSGTRRAGAAVVDGHNTIWAQSLPPGTSAQKAELIALTKALELSKGKKANIYTDSRYAFATAHTHGSIYERRGLLTSEGKEIKNKAEIIALLKALFLPQEVAIIHCPGHQKGQDPVAVGNRQADRVARQAAMAEVLTLATEPDNTSH

SEQ ID NO: 436 - protein, 652 aa, Feline endogenous virus
LQDFPQAWAETGGLGRAKCQVPIIIDLKPTAMPVSIRQYPMSKEAHMGIQPHITRFLELGVLRPCRSPWNTPLLPVKKPGTRDYRPVQDLREVNKRTMDIHPTVPNPYNLLSTLSPDRTWYTVLDLKDAFFCLPLAPQSQELFAFEWRDPERGISGQLTWTRLPQGFKNSPTLFDEALHRDLTDFRTQHPEVTLLQYVDDLLLAAPTKEACIRGTKHLLRELGDKGYRASAKKAQICQTKVTYLGYILSEGKRWLTPGRIETVAHIPPPQNPREVREFLGTAGFCRLWIPGFAELAAPLYALTKESAPFTWQEKHQSAFEALKEALLSAPALGLPDTSKPFTLFIDEKQGIAKGVLTQKLGPWKRPVAYLSKKLDPVAAGWPPCLRIMAATAMLVKDSAKLTLGQPLTVITPHALEAIVRQTPDRWITNARLTHYQALLLDTDRIQFGPPVTLNPATLLPAPEDQQSAHDCRQVLAETHGTREDLKDQELPDADHSWYTDGSSYIDSGTRRAGAAVVDGHHIIWAQSLPPGTSAQKAELIALTKALELSEGKKANIYTDSRYAFATAHTHGSIYERRGLLTSEGKEIKNKAEIIALLKALFLPRKVAIIHCPGHQKGQDPIATGNRQADQVARQVAVAETLTLTTKLEETNL

SEQ ID NO: 437 - protein, 672 aa, Porcine endogenous retrovirus
TLQLDDEYRLFSPPVKLDQNIQFGSTQFPQALAEPAGMGLAKQVPPQVIQLKPSLAPVPVRQSPFSKEAREGIRPHVQRLIQQGIIVPVQSPWNTPLLPVRKPGTNDYRPVQDFERGQKRVQDIHPTVPNPYNLLCALPPQRSWYTVLDLKDAFFCLRLHPTSQPLFAFEWRDPGAGRTGQLTWTRLPQGFKNFPTIFDQALHRDLANFRIQHPQVTLLQYVDDLVLAAATKQDCLQRPKGLLVELSDLGDRAFGYKAHICPTEVTYLGYRLRGRHRWLTEAPQTTVVQIPGPTPAKQVREFLGTVGFCRLWIPGFATLPAPLYPLPKEKGEFSWALQHQKAFDAIKKALLSAPALALPDVTKTLYVDERKGVARGVLTQTLGPWRRPVAYLSKKLDPVASGWPICLKAIAAVAILVKDADKLTLGQNITVIAPHALENIVRQPPDRWMTNARMTHYQSLLLTERVTFAPPAALNPATLLPEETDEPLTHDCHQLLIEETGVRKDLTDIPLTGEPVTWFTDGSSYLVEGNKMAGAAVVDRTPTIWGTNLPERTSSQKGELIGLMQAFRLGQGKSINIYTDSRYAFATAHVHGAIYTQRGLLTSAGREIKNKEEILSLLEALHLPKRLAIIHCPGHQKAKDPISRGNQMADRVAKQAAQGVNLLPMIETPKAP

SEQ ID NO: 438 - protein, 676 aa, Porcine endogenous retrovirus
TLQLDEYRLYSPLVKPDQNIQFWLEQFPKAWAETAGMGLAKQVPPQVIQLKASAAPVSVRQYLLSKEAREGIGPHVQRLIQQGILVPVQSPWNTPLLPVRKPGTNDYRPVQDLREVNKRVQDIHPTVPNPYNLLCALPPQRSWYTVLDLKDAFFCLRLHPTSQPLFAFEWRDPGAGRTGQLTWTRLPQGFKNSPTIFDEALHRDLANFRIQHPQVTLLQYVDDLLLAGATKQDCLEGLLLELFDLGYRASAKKAQICRREATQLGVQVCGAGQSDWLTGKARKKTVQPKIGPPTTAKQVVREFFGAQVGFCRLWIPGFATLAAPLYPLTKEKGEFSWALEHQKAFDAIKKALSSAPALALPDVLKPFTLYVDERKGVARGVLTQILGPWRRPVAYLSKKLDPVASGWPICLKAIAAVAILVKDADKLTLGQNITVIAPHALENIVRQPPDRWMTNARMTHYQSLLLTERVTFAPPAALNPATLLPEETDEPVTHDCHLLIEETGVRKDLTDIPPLTGKMLTWFTDGSSYVVEGKSMAGPPVVTGTRTIWASSLPEGTSAQKAELMALTQALRLAEGKSINIYTDSRYAFATAHVHGAIYKQRGLLTSAGREIKTKEEILSLLEALHLPKRLAIIHCPGHQKAKDPISRGNQMADRVAKQAAQGVNLLPMIETPKAP

SEQ ID NO: 439 - protein, 674 aa, Porcine endogenous retrovirus C
TLQLDDEYRLYSPLVKPDQNIQSWLEQFPQAWAETAGMGLAKQVPPQVIQLKASATPISVRQYPLSREAREEIWPHVQRLIQQGILVPVRSPWNTPLLPVRKPGTNDYRPVQDLREVNKRVQDIHPMVPNPYNLLSALPPKRNWYTVLDLKNAFFCLRLHPTSQPLFAFEWRDPGTGRTGQLTWTRLPQGFKNSPTIFDEALHRDLANFRIQHPQVTLLQYVDDLLLAGATKQDCLEGTNALLLELSDLGYRASAKKAQICRREVTYLGYSLRDGQRWLTEARKRTVVQILAPTTAKQVREFLGTAGFCRLWIPGFATLAAPLYPLTKEKGEFSWAPEHQKAFDAIKKALLSAPALALPDVTKPFTLYVDEHKGVARGVLTQSLGPWRRPVAYLSKKLDPVASGWPVCLKAIAAVAILVKDADKSTLGQNITVIAPHALENIVRQPPDRWMTNARMTHYQSLLLTERITFAPPAALNPATLLPEETDEPVTHDCHQLLIEETGVRKDLTDIPLTGEVLTWFTDGSSYVVEGKRMARAAVVDGTRTIWASSLSEGTSAQKAELVALTQALRLAEGKSINIYTDSRYAFATAHVHGAIYKQRGLLTSAGREVKNKEKILSLLEALHLPKRLAIIHCPGHQKAKDLISRGNQMADRVAKQAAQGVNLLPIIETPKAP

SEQ ID NO: 440 - protein, 674 aa, Porcine endogenous retrovirus C/A
TLQLDDEYRLYSPLVKPDQNIQFWLEQFPQAWAETAGMGLAKQVPPQVIQLKASATPVSVRQYPLSKEAQEGIRPHVQRLIQQGILVPVQSPWNTPLLPVRKPGTNDYRPVQDLREVNKRVQDIHPTVPNPYNLLCALPPQRSWYTVLDLKDAFFCLRLHPTSQPLFAFEWRDPGTGRTGQLTWTRLPQGFKNSPTIFDEALHRDLANFRIQHPQVTLLQYVDDLLLAGATKQDCLEGTKALLLELSDLGYRASAKKAQICRREVTYLGYSLRDGQRWLTEARKKTVVQIPAPTTAKQMREFLGTAGFCRLWIPGFATLAAPLYPLTKEKGEFSWAPEHQKAFDAIKKALLSAPALALPDVTKPFTLYVDERKGVARGVLTQTLGPWRRPVAYLSKKLDPVASGWPICLKAIAAVAILVKDADKLTLGQNITVIAPHALENIVRQPPDRWMTNARMTHYQSLLLTERVTFAPPAALNPATLLPEETDEPVTHDCHQLLIEETGVRKDLTDIPLTGEVLTWFTDGSSYVVEGKRMAGAAVVDGTRTIWASSLPEGTSAQKAELMALTQALRLAEGKSINIYTDSRYAFATAHVHGAIYKQRGLLTSAGREIKNKEEILSLLEAVHLPKRLAIIHCPGHQKAKDLISRGNQMADRVAKQAAQGVNLLPIIEMPKAP

SEQ ID NO: 441 - protein, 674 aa, Porcine endogenous retrovirus C/A
TLQLDDEYRLYSPLVKPDQNIQFWLEQFPQAWAETAGMGLAKQVPPQVIQLKASATPVSVRQYPLSKEAQEGIRPHVQRLIQQGILVPVQSPWNTPLLPVRKPGTNDYRPVQDLREVNKRVQDIHPTVPNPYNLLCALPPQRSWYTVLDLKDAFFCLRLHPTSQPLFAFEWRDPGTGRTGQLTWTRLPQGFKNSPTIFDEALHRDLANFRIQHPQVTLLQYVDDLLLAGATKQDCLEGTKALLLELSDLGYRASAKKAQICRREVTYLGYSLRDGQRWLTEARKKTVVQIPAPTTAKQVREFLGTAGFCRLWIPGFATLAAPLYPLTKEKGEFSWAPEHQKAFDAIKKALLSAPALALPDVTKPFTLYVDERKGVARGVLTQTLGPWRRPVAYLSKKLDPVASGWPVCLKAIAAVAILVKDADKLTLGQNITVIAPHALENIVRQPPDRWMTNARMTHYQSLLLTERVTFAPPAALNPATLLPEETDEPVTHDCHQLLIEETGVRKDLTDIPLTGEVLTWFTDGSSYVVEGKRMAGAAVVDGTRTIWASSLPEGTSAQKAELMALTQALRLAEGKSINIYTDSRYAFATAHVHGAIYKQRGLLTSAGREIKNKEEILSLLEALHLPKRLAIIHCPGHQKAKDPISRGNQMADRVAKQAAQGVNLLPMIETPKAP

SEQ ID NO: 442 - protein, 674 aa, Porcine endogenous retrovirus C
TLQLDDEYRLYSPLVKPDQNIQFWLEQFPQAWAETAGMGLAKQVPPQVIQLKASAAPVSVRQYPLSKEAREGIRPHVQRLIQQGILVPVQSPWNTPLLPVRKPGTNDYRPVQDLREVNKRVQDIHPTVPNPYNLLCALPPQRSWYTVLDLKDAFFCLRLHPTSQPLFAFEWRDPGAGRTGQLTWTRLPQGFKNSPTIFDEALHRDLANFRIQHPQVTLLQYVDDLLLAGATKQDCLEGTKALLLELSDLGYRASAKKAQICRREVTYLGYSLRGGQRWLTEARKRTVVQIPAPTTAKQVREFLGTAGFCRLWIPGFATLAAPLYPLTKEKGEFSWAPEHQKAFDAIKKALLSAPALALPDVTKPFTLYVDERKGVARGVLTQTLGPWRRPVAYLSKKLDPVASGWPICLKAIAAVAILVKDADKLTLGQNITVIAPHALENIVRQPPDRWMTNARMTHYQSLLLTERVTFAPPAALNPATLLPEETDEPVTHDCHQLLIEETGVRKDLTDIPLTGEMLTWFTDGSSYMVEGKRMAGAAVVDGTRTIWASSLPEGTSAQKAELMALTQALRLAEGKSINIYTDSRYAFATAHVHGAIYKQRGLLTSAGREIKNKEEILSLLEALHLPKRLAIIHCPGHQKAKDPISRGNQMADRVAKQAAQGVNLLPMIETPKAP

SEQ ID NO: 443 - protein, 674 aa, Porcine endogenous retrovirus
TLQLDDEYRLYSSLVKPDQNIQFWLEQFPQAWAETAGMGLAKQVPPQVIQLKASAAPVSVRQYPLSKEAREGIRPHVQRLIQQGILVPVQSPWNTPLLPVRKPGTNDYRPVQDLREVNKRVQDIHPTVPNPYNLLCALPPQRSWYTVLDLKDAFFCLRLHPTSQPLFAFEWRDPGAGRTGQLTWTRLPQGFKNSPTIFDEALHRDLANFRIQHPQVTLLQYVDDLLLAGATKQDCLEGTKALLLELSDLGYRASAKKAQICRREVTYLGYSLRGGQRWLTEARKRTVVQIPAPTTAKQVREFLGTAGFCRLWIPGFATLAAPLYPLTKEKGEFSWAPEHQKAFDAIKKALLSAPALALPDVTKPFTLYVDERKGVARGVLTQTLGPWRRPVAYLSKKLDPVASGWPVCLKAIAAVAILVKDADKLTLGQNITVIAPHALENIVRQPPDRWMTNARMTHYQSLLLTERVTFAPPAALNPATLLPEETDEPVTHDCHQLLIEETGVRKDLTDIPLTGEVLTWFTDGSSYVVKGKRMAGPPVVDGTRTIWASSLPEGTSAQKAELMALTQALRLAEGKSINIYTDSRYAFATAHVHGAIYKQRGLLTSAGREIKNKEEILSLLEALHLPKRLAIIHCPGHQKAKDPISRGNQMADRVAKQAAQGVNLLPMIETPKAP

SEQ ID NO: 444 - protein, 674 aa, Porcine endogenous retrovirus C
TPQLDDEYRLYSPQVKPDQDIQSWLEQFPQAWAETAGMGLAKQVPPQVIQLKASATPVSVRQYPLSREAREGIWPHVQRLIQQGILVPVQSPWNTPLLPVRKPGTNDYRPVQDLREVNKRVQDIHPTVPNPYNLLSALPPERNWYTVLDLKDAFFCLRLHPTSQPLFAFEWRDPGTGRTGQLTWTRLPQGFKNSPTIFDEALHRDLANFRIQHPQVTLLQYVDDLLLAGATKQDCSEGTKALLLELSDLGYRASAKKAQICRREVTYLGYSLRDGQRWLTEARKKTVVQIPAPTTAKQVREFLGTAGFCRLWIPGFATLAAPLYPLTKEKGEFSWAPEHQKAFDAIKKALLSAPALALPDVTKPFTLYVDERKGVARGVLTQTLGPWRRPVAYLSKKLDPIASGWPVCLKAIAAVAILVKDADKLTLGQNITIIAPHALENIVRQPPDRWMTNARMTQYQSLLLTERITFAPPAALNPATLLPEETDEPVTHDCHQLLIEETGVRKDLIDIPLTGEVLTWFTDGSSYVVEGKRMAGAAVVDGTRTIWASSLPEGTSAQKAELMALTQALRLADGKSINIYTDSRYAFATAHVHGAIYKQRGLLTSAGREIKNKEEILSLLEALHLPKRLAIIHCPGHQKAKDPISRGNQMADRVAKQAAQGVNLLPIIETPKAP

SEQ ID NO: 445 - protein, 674 aa, Porcine endogenous retrovirus
TLQLDDEYRLYSPQVKPDQDIQSWLEQFPQAWAETAGMGLAKQVPPQVIQLKASATPVSVRQYPLSREAREGIWPHVQRLIQQGILVPVQSPWNTPLLPVRKPGTNDYRPVQDLREVNKRVQDIHPTVPNPYNLLSALPPERNWYTVLDLKDAFFCLRLHPTSQPLFAFEWRDPGTGRTGQLTWTRLPQGFKNSPTIFDEALHRDLANFRIQHPQVTLLQYVDDLLLAGATKQDCLEGTKALLLELSDLGYRASAKKAQICRREVTYLGYSLRGGQRWLTEARKKTVVQIPAPTTAKQVREFLGTAGFCRLWIPGFATLAAPLYPLTKEKGEFSWAPEHQKAFDAIKKALLSAPALALPDVTKPFTLYVDERKGVARGVLTQTLGPWRRPVAYLSKKLDPVASGWPICLKAIAAVAILVKDADKLTLGQNITVIAPHALENIVRQPPDRWMTNARMTHYQSLLLTERVTFAPPAALNPATLLPEETDEPVTHDCHQLLIEETGVRKDLTDIPLTGEVLTWFTDGSSYVVEGKRMAGAAVVDGTRTIXASSLPEGTSAQKAELMALTQALRLAEGKSINIYTDSRYAFATAHVHGAIYKQRGLLTSAGREIKNKDEILSLLEALHLPKRLAIIHCPGHQKAKDLISRGNQMADRIAKQAAQAVNLLPIIETPKAP

SEQ ID NO: 446 - protein, 674 aa, Porcine endogenous retrovirus
TLQLDDEYRLYSPQVKPDQDIQSWLEQFPQAWAETAGMGLAKQVPPQVIQLKASATPVSVRQYPLSREAREGIWPHVQRLIQQGILVPVQSPWNTPLLPVRKPGTNDYRPVQDLREVNKRVQDIHPTVPNPYNLLSALPPERNWYTVLDLKDAFFCLRLHPTSQPLFAFEWRDPGTGRTGQLTWTRLPQGFKNSPNIFDEALHRDLANFRIQHPQVTLLQYVDDLLLAGATKQDCLEGTKALLLELSDLGYRASAKKAQICRREVTYLGYSLRGGQRWLTEARKKTVVQIPAPTTAKQVREFLGTAGFCRLWIPGFATLAAPLYPLTKEKGEFSWAPEHQKAFDAIKKALLSAPALALPDVTKPFTLYVDERKGVARGVLTQTLGPWRRPVAYLSKKLDPVASGWPVCLKAIAAVAILVKDADKLTLGQNITVIAPHALENIVRQPPDRWMTNARMTHYQSLLLTERVTFAPPAALNPATLLPEETDEPVTHDCHQLLIEETGVRKDLTDIPLTGEVLTWFTDGSSYVVEGKRMAGAAVVDGTHTIWASSLPEGTSAQKAELMALTQALRLAEGKSINIYTDSRYAFATAHVHGAIYKQRGLLTSAGREIKNKEEILSLLEALHLPKRLAIIHCPGHQKAKDLISRGNQMADRVAKQAAQAVNLLPIIETPKAP

SEQ ID NO: 447 - protein, 672 aa, Mus dunni endogenous virus
VLSTEEEYRLHEEQPKGAAPLDWVTAFPNVWAEQAGMGLAKQVPPVVVELKADATPISVRQYPMSKEAKEGIRPHIRRLLDQGILVACQSPWNTPLLPVRKPGTNDYRPVQDLREVNKRVLDIHPTVPNPYNLLSSLPPERTWYTVLDLKDAFFCLRLHPKSQLLFAFEWRDPEGGQTGQLTWTRLPQGFKNSPTLFDEALHRDLAPFRAQNPQLTLLQYVDDLLIAAASKELCQQGTERLLTELGNLGYRVSAKKAQICQTEVIYLGYTLRGGKRWLTEARKKTVMMIPPPTTPRQVREFLGTAGFCRLWIPGFATLAAPLYPLTREGIPFEWKEEHQRAFEAIKSSLMTAPALALPDLTKSFVLYVDERAGIARGVLTQALGPWKRPVAYLSKKLDPVASGWPTCLKAIAAVALLIKDADKLTMGQQVTVVAPHALESIVRQPPDRWMTNARMTHYQSLLLNDRVTFAPPAILNPATLLPLTNDSVPVHRCADILAEEIGTRKDLTDQPWPGAPSWYTDGSSFLIEGKRRAGAAVVDGKKVIWASALPEGTSAQKAELIALTQALREAEGKIINIYTDSRYAFATAHIHGAIYRQRGLLTSAGKDIKNKEEILALLEAIHAPKKVAIIHCPGHQKGEDLVAKGNRMADSVAKQVAQGAMILTEKGNPSKS

SEQ ID NO: 448 - protein, 673 aa, Koala retrovirus
VLNLEEEYRLHEKPVPPSIDPSWLQLFPMVWAEKAGMGLANQVPPVVVELKSDASPVAVRQYPMSKEAREGIRPHIQRFLDLGILVPCQSPWNTPLLPVKKPGTNDYRPVQDLREVNKRVQDIHPTVPNPYNLLSSLPPSHTWYSVLDLKDAFFCLKLHPNSQPLFAFEWRDPEKGNTGQLTWTRLPQGFKNSPTLFDEALHRDLASFRALNPQVVMLQYVDDLLVAAPTYRDCKEGTRRLLQELSKLGYRVSAKKAQLCREEVTYLGYLLKGGKRWLTPARKATVMKIPTPTTPRQVREFLGTAGFCRLWIPGFASLAAPLYPLTREKVPFTWTEAHQEAFGRIKEALLSAPALALPDLTKPFALYVDEKEGVARGVLTQTLGPWRRPVAYLSKKLDPVASGWPTCLKAIAAVALLLKDADKLTLGQNVLVIAPHNLESIVRQPPDRWMTNARMTHYQSLLLNERVSFAPPAILNPATLLPVESDDTPIHICSEILAEETGTRPDLRDQPLPGVPAWYTDGSSFIMDGRRQAGAAIVDNKRTVWASNLPEGTSAQKAELIALTQALRLAEGKSINIYTDSRYAFATAHVHGAIYKQRGLLTSAGKDIKNKEEILALLEAIHLPKRVAIIHCPGHQRGTDPVATGNRKADEAAKQAAQSTRILTETTKNQEHF

SEQ ID NO: 449 - protein, 672 aa, Gibbon ape leukemia virus
VLNLEEEYRLHEKPVPSFVDPSWLQLFPTVWAERTGMGLANQVPPVVVELKSGASPVAVRQYPMSKEAREGIRPHIQKFLDLGVLVPCQSPWNTPLLPVKKPGTNDYRPVQDLREINKRVQDIHPTVPNPYNLLSSLPPSHIWYSVLDLKDAFFCLRLHPNSQPLFAFEWRDPEKGNTGQLTWTRLPQGFKNSPTLFDEALHRDLAPFRALNPQVVLLQYVDDLLVAAPTYEDCKEGTQKLLQELSKLGYRVSAKKAQLCQKEVTYLGYLLKEGKRWLTPARKATVMKIPAPTTPRQVREFLGTAGFCRLWIPGFASLAAPLYPLTKESFPFVWTEEHQKAFDHIKEALLSAPALALPDLTKPFTLYVDERAGMARGVLTQTLGPWRRPVAYLSKKLDPVASGWPTCLKAVAAVALLLKDADKLTLGQKVTVIASHSLESIVRQPPDRWMTNARMTHYQSLLLNERVSFAPPAVLNPATLLPVESEATPVHRCSEILAEETGTRRDLKDQPLPGVSAWYTDGSSFIVEGKRRAGAAIVDGKRTVWASSLPEGTSAQKAELVALTQALRLAKGRNINIYTDSRYAFATAHIHGAIYKQRGLLTSAGKDIKNKEEILALLEAIHLPKQVAIIHCPGHQRGNNPVATGNRRADEAAKQAALSTRVLAEITKLQEP

SEQ ID NO: 450 - protein, 672 aa, Gibbon ape leukemia virus
VLNLEEEYRLHEKPVPSFVDPSWLQLFPTVWAERAGMGLANQVPPVVVELKSGASPVAVRQYPMSKEAREGIRPHIQKFLDLGVLVPCQSPWNTPLLPVKKPGTNDYRPVQDLREINKRVQDIHPTVPNPYNLLSSLPPSHIWYSVLDLKDAFFCLRLHPNSQPLFAFEWRDPEKGNTGQLTWTRLPQGFKNSPTLFDEALHRDLAPFRVLNPQVVLLQYVDDLLVAAPTYEDCKEGTQKLLQELSKLGYRVSAKKAQLCQKEVTYLGYLLKEGKRWLTPARKATVMKIPAPTTPRQVREFLGTAGFCRLWIPGFASLAAPLYPLTKESFPFVWTEEHQKAFDHIKEALLSAPALALPDLTKPFTLYVDERAGMARGVLTQTLGPWRRPVAYLSKKLDPVASGWPTCLKAVAAVALLLKDADKLTLGQKVTVIASHSLESIVRQPPDRWMTNARMTHYQSLLLNERVSFAPPAVLNPATLLPVESEATPVHRCSEILAEETGTRRDLKDQPLPGVSAWYTDGSSFIAEGKRRAGAAIVDGKRTVWASSLPEGTSAQKAELVALTQALRLAKGRNINIYTDSRYAFATAHIHGAIYKQRGLLTSAGKDIKNKEEILALLEAIHLPKQVAIIHCPGHQRGSNPVATGNRRADEAAKQAALSTRVLAETTKPQEP

SEQ ID NO: 451 - protein, 673 aa, Gibbon ape leukemia virus
VLNLEEEYRLHEKPVPSSIDPSWLQLFPTVWAERAGMGLANQVPPVVVELRSGASPVAVRQYPMSKEAREGIRPHIQKFLDLGVLVPCRSPWNTPLLPVKKPGTNDYRPVQDLREINKRVQDIHPTVPNPYNLLSSLPPSYTWYSVLDLKDAFFCLRLHPNSQPLFAFEWKDPEKGNTGQLTWTRLPQGFKNSPTLFDEALHRDLAPFRALNPQVVLLQYVDDLLVAAPTYEDCKKGTQKLLQELSKLGYRVSAKKAQLCQREVTYLGYLLKEGKRWLTPARKATVMKIPVPTTPRQVREFLGTAGFCRLWIPGFASLAAPLYPLTKESIPFIWTEEHQQAFDHIKKALLSAPALALPDLTKPFTLYIDERAGVARGVLTQTLGPWRRPVAYLSKKLDPVASGWPTCLKAVAAVALLLKDADKLTLGQNVTVIASHSLESIVRQPPDRWMTNARMTHYQSLLLNERVSFAPPAVLNPATLLPVESEATPVHRCSEILAEETGTRRDLEDQPLPGVPTWYTDGSSFITEGKRRAGAPIVDGKRTVWASSLPEGTSAQKAELVALTQALRLAEGKNINIYTDSRYAFATAHIHGAIYKQRGLLTSAGKDIKNKEEILALLEAIHLPRRVAIIHCPGHQRGSNPVATGNRRADEAAKQAALSTRVLAGTTKPQEPI

SEQ ID NO: 452 - protein, 672 aa, Gibbon ape leukemia virus
VLSLEEEYRLHEKPVPTSIDPSWLQLFPTVWAERAGMGLANRVPPVVVELKSGASPVAVRQYPMSKEAREGIRPHIQRFLDLGVLVPCRSPWNTPLLPVKKPGTNDYRPVQDLREINKRVQDIHPTVPNPYNLLSSLPPSHTWYSVLDLKDAFFCLKLHPNSQSLFAFEWKDPEKGNTGQLTWTRLPQGFKNSPTLFDEALHRDLALFRAHNPQVKLLQYVDDLLVAAPTYQDCKEGTQKLLQELSKLGYRVSAKKAQLCQKEVTYLGYLLKEGKRWLTPARKATVMKIPAPTTPRQVREFLGTAGFCRLWIPGFASMAAPLYPLTKESIPFIWTEEHQKAFDLIKKALLSAPALALPDLTKPFTLYVDERAGVARGVLTQTLGPWRRPVAYLSKKLDPVASGWPTCLKAVAAVALLLKDADKLTLGQNVTVIASHSLESIVRQPPDRWMTNARMTHYQSLLLNERVSFAPPAVLNPATLLPVESEATPVHRCSEILAEETGTRQDLKDQPLPGVPTWYTDGSSFIAEGKRKAGAAIVDGKRTVWASSLPEGTSAQKAELVALTQALRLAEGRNINIYTDSRYAFATAHIHGAIYKQRGLLTSAGKDIKNKEEILALLEAIHLPKRVAIIHCPGHQKGNDPVATGNRRADEAAKQAALSTRVLAETTKPQEP

SEQ ID NO: 453 - protein, 672 aa, Flying-fox retrovirus
VLGLEEEYRLHEKPVPSSVDPSWLQLFPDVWAEKGGMGLANRVPPIVVELKSDALPVAVRQYPMSREAREGIRPHIQRFLDLGVLVPCQSPWNTPLLPVKKPGTSDYRPVQDLREINKRVQDIHPTVPNPYNLLSSLPPNHTWYSVLDLKDAFFCLKLHPNSQLLFAFEWRDPEKGHTGQLTWTRLPQGFKNSPTLFDEALHRDLASFRASNPQVVLLQYVDDLLVAAPTYKDCKEGTQKLLQELSELGYRVSAKKAQLCQREVTYLGYLLKEGKRWLTPARKATVMEIPTPTTPRQVREFLGTAGFCRLWIPGFASLAAPLYPLTKESTPFLWTEEHRRAFDQIKEALLTAPALALPDLTKPFALYVDERAGVARGVLTQTLGPWRRPVAYLSKKLDPVASGWPTCLKAVAAVALLLKDADKLTLGQSVTVIASHSLESIVRQPPDRWMTNARMTHYQSLLLNERVSFAPPAVLNPATLLPAESGAAPVHECSEILAEETGTRQDLTDQPLPGVPAWYTDGSSFITEGKRRAGAAIVDGKRTVWMSSLPEGTSAQKAELIALTQALRLADGKDINIYTDSRYAFATAHIHGAIYRQRGLLTSAGKEIKNKEEILALLEAIHLPKRVAIIHCPGHQKGNDPVAIGNRRADEAAKQAALAVRVLAETIEPQGQ

SEQ ID NO: 454 - protein, 672 aa, Hervey pteropid gammaretrovirus
VLNLEEEYRLHEKPAPPSIDPFWLQLFPNVWAEQGGMGLANQVPPVVVELKSDASPVAVRQYPMSKEAREGIRPHIQRFLDLGVLVPCQSPWNTPLLPVKKPGTNDYRPVQDLREINKRVQDIHPTVPNPYNLLSSLPPSHTWYSVLDLKDAFFCLKLHPNSQLLFAFEWRDPEKGHTGQLTWTRLPQGFKNSPTLFDEALHRDLASFRASNPQVILLQYVDDLLVAAPTYEDCKEGTQKLLQELSELGYRVSAKKAQLCQKEVTYLGYLLKEGKRWLTPARKATVMRIPTPITPRQVREFLGTAGFCRLWIPGFASLAAPLYPLTKESVPFLWTEEHQRAFDHIKEALLTAPALALPDLTKPFALYVDEKAGVARGVLTQTLGPWRRPVAYLSKKLDPVASGWPTCLKAVAAVALLLKDADKLTLGQNVTVIASHSLESIVRQPPDRWMTNARMTHYQSLLLNERVSFAPPAVLNPATLLPAESEAALVHDCSEILAEETGTRQDLTDQPLPGVPAWYTDGSSFIAEGKRRAGAAIVDNKRTVWMSSLPEGTSAQKAELIALTQALRLADGKDINIYTDSRYAFATAHIHGAIYRQRGLLTSAGKEIKNKEEILALLEAIHLPRRVAIVHCPGHQKGNDPIALGNRRADEAAKQAALSVRVLAETTGPQGP

SEQ ID NO: 455 - protein, 672 aa, Macroglossus minimus gammaretrovirus
VLNLEEEYRLHEKPVPSSIDPLWLQLFPNVWAEKGGMGLASQVPPVVVELKSDASPVAVRQYPMSREAQEGIRPHIQRFLDLGVLVPCQSPWNTPLLPVKKPGTNDYRPVQDLREVNKRVQDIHPTVPNPYNLLSSLPPSHTWYTVLDLKDAFFCLKLHPNSQPLFAFEWRDPEKGHTGQLTWTRLPQGFKNSPTLFDEALHRDLASFRASNPQVVLLQYVDDLLVAAPTYEDCKEGTQKLLQELSNLGYRVSAKKAQLCQKEVTYLGYLLKEGQRWLTPARKATVMGIPTPTTPRQVREFLGTAGFCRLWIPGFASLAAPLYPLTKESTPFLWTEEHQKAFDCIKEALLTAPALALPDLTKPFALYVDERDGVARGVLTQTLGPWRRPVAYLSKKLDPVASGWPTCLKAVAAVALLLKDADKLTLGQNVTVIASHSLESIVRQPPDRWMTNARMTHYQSLLLNERVSFAPPAVLNPATLLPAESEAAPVHTCSEILAEETGTRKDLTDQPLPGVPAWYTDGSSFITEGKRRAGAAIVDSKRTVWMSSLPEGTSAQKAELIALTQALRLANGRDINIYTDSRYAFATAHIHGAIYRQRGLLTSAGKEIKNREEILALLEAIHLPRRVAIIHCPGHQKGNDPVAVGNRRADEAAKQAALSVQVLAEITKPQEL

SEQ ID NO: 456 - protein, 678 aa, Galidia ERV
TLPLAEEYLLYEGPHDTGDRWLEKWKDELPGVWAETNPPGLAKDRPPIHVQLMSTAQPIRVRQYPMTLEARRGVRENIRKLRAAGILVPCHSPWNTPLLPVRKAETGQYRMVQDLREVNKRVETIHPTVPNPYTLLSLLPPDHIWYSVLDLKDAFFCLPLAPGSQPLFAFEWSDPEEGESGQLTWTRLPQGFKNSPTLFDEALSHDLQSYRTGHPEVTLLQYMDDLIVAARSEAECAQATRDLLETLGDQGYRVSAKKAQLCSQQVTYLGFRLKGGTRTLTESRIKAIVQIPSPKTKRQVREFLGTVGYCRLWIPGFAELAKPLHAVAGGGARPLTWTKTEEEAFQALKSALLQAPALSLPDLEKPFQLFVAENKGVAKGVLTQRIGPWKRPVAYLSRKLDPVAAGWPGCLRAIAAAALLVKEASKLTFGQNLEVTSAHNLESLLRSPPDRWMTNTRVTQYQVLLLDPPRVSFRQTAALNPATLLPEADESLPFHQCEDTLDALTTLRPDLTDRPLLDAEVTLFTDGSSFVDQGXRHAGAAIVTLDSTIWAEALPKGTSAQRAELIALTKALLWGEDKRVNIYTDSRYAFATLHVHGALYKERGLLTTGGKEIKNAPEILALLSSVWKPKKVAVIHCRGHQKNDTNIARGNQRADRVAKEVARGEIAPVLTLQEPNPV

SEQ ID NO: 457 - protein, 678 aa, Echidna ERV
SSPLVEEYRLFVEQPAQNLALLDLWREDIPEVWAESNPPGLATTQVPVHVQLTSTALPIRIRQYPISLEARRSLRGSIRKFKAAGILKPVHSPWNTPLLPVRKTGTSEYRMVQDLREVNKRVETIHPTVPNPYTLLSLLPPDRTWYSVLDLKDAFFCIPLTCQSQLLFAFEWIDIEEGESGQLTWTRLPQGFKNSPTLFDEALSRDLQGYRFDHPTVTLLQYVDDLLIAARSRDECLQATRDLLVTLGSMGYRVSGSKAQLCQEEVTYLGFRIKDGTRTLAQSRVQAILQIPAPKTKKQVREFLGTVGYCRLWIPSFAELAQPLYAATRGADAPLRWTGTEEEAFQRLKTALLQPPALALPNLDKPFQLFVDEAKGVAKGVLMQTLGPWKRPVAYLSRKLDPLAAGWPRCLRAIAAAALLSKEASKLTFEQSLEITSSHNLEGLLRTPPDKWLTNARVTQYQVLLLDPPRVIFKQTAALNPATLLPATDDSLPLHHCADTLDALTTTRPDLTDQPLADAEATLFTDGSSYVKKAEYAGAAVVTTNSIVWAEALPRGTSAQRAELIALTKALEWSRDKTVNIYTDSRYAFATLHVHAMIYKERGLLTAGGKAIKNASEILALLTAIWLPKRVAVIHCRGHQQGESLEALGNRLADKTAREVAKKSPAIQASLCDPPRTP

SEQ ID NO: 458 - protein, 679 aa, Duck infectious anemia virus
TAPLEEEYRLFLEAPIQNVTLLEQWKREIPKVWAEINPPGLASTQAPIHVQLLSTALPVRVRQYPITLEARRSLRETIRKFRAAGILRPVHSPWNTPLLPVRKPGTSEYRMVQDLREVNKRVETIHPTVPNPYTLLSLLPPDRTWYSVLDLKDAFFCIPLAPESQLIFAFEWTDAEEGESGQLTWTRLPQGFKNSPTLFDEALNRDLQGFRLDHPSVSLLQYVDDLLIAADTQAACLSATRDLLMTLAELGYRVSGKKAQLCQEEVTYLGFKIHKGSRTLSNSRTQAILQIPVPKTKRQVREFLGTIGYCRLWIPGFAELAQPLYAATRGGNDPLEWGEKEEEAFQSLKLALTQPPALALPSLDKPFQLFIEETGGAAKGVLTQTLGPWKRPVAYLSKRLDPVAAGWPRCLRAIAAAALLTREASKLTFGQDIEITSSHNLESLLRSPPDRWLTNARITQYQVLLLDPPRVRFKQTAALNPATLLPETDDTLPIHHCLDTLDSLTSTRPDLTDQPLAQAEATLFTDGSSYIRDGKRYAGAAVVTLDSVVWAEPLPIGTSAQKAELIALTKALEWSKDKSVNIYTDSRYAFATLHVHGMIYKERGLLTAGGKAIXNAPEILALLTAVWLPKRVAVMHCRGHQKDDAPTSAGNRRADEVAREVAIRPLSVQATVSDAPDMP

SEQ ID NO: 459 - protein, 679 aa, Reticuloendotheliosis virus
TAPLEEEYRLFLEAPIQNVTLLEQWKREIPKVWAEINPPGLASTQAPIHVQLLSTALPVRVRQYPITLEARRSLRETIRKFRAAGILRPVHSPWNTPLLPVRKPGTSEYRMVQDLREVNKRVETIHPTVPNPYTLLSLLPPDRTWYSVLDLKDAFFCIPLAPKSQLIFAFEWTDAEEGESGQLTWTRLPQGFKNSPTLFDEALNRDLQGFRLEHPSVSLLQYVDDLLIAADTQAACLSATRDLLMTLAELGYRVSGKKAQLCQEEVTYLGFKIHKGSRTLSNSRTQAILQIPVPKTKRQVREFLGTIGYCRLWIPGFAELAQPLYAATRGGNDPLEWGEKEEEAFQSLKLALTQPPALALPSLDKPFQLFIEETGGAAKGVLTQALGPWKRPVAYLSKRLDPVAAGWPRCLRAIAAAALLTREASKLTFGQDIEITSSHNLESLLRSPPDRWLTNARITQYQVLLLDPPRVRFKQTAALNPATLLPETDDTLPIHHCLDTLDSLTSTRPDLTDQPLAQAEATLFTDGSSYIRDGKRYAGAAVVTLDSVIWAEPLPIGTSAQKAELIALTKALEWSKDKSVNIYTDSRYAFATLHVHGMIYKERGLLTAGGKAIKNAPEILALLTAVWLPKRVAVMHCRGHQKDDAPTSAGNRRADEVAREVAIRPLSIQATVSDAPDMP

SEQ ID NO: 460 - protein, 679 aa, Reticuloendotheliosis virus
TAPLEEEYRLFLEAPIQNVTLLEQWKREIPKVWAEINPPGLASTQAPIHVQLLSTALPVRVRQYPITLEARRSLRETIRKFRAAGILRPVHSPWNTPLLPVRKPGTSEYRMVQDLREVNKRVETIHPTVPNPYTLLSLLPPDRTWYSVLDLKDAFFCIPLAPKSPLIFAFEWTDAEEGESGQLTWTRLPQGFKNSPTLFDEALNRDLQGFRLDHPSVSLLQYVDDLLIAADTQAACLSATRDLLMTLAELGYRVSGKKAQLCQEEVTYLGFKIHKGSRTLSNSRIQAILQIPVPKTKRQVREFLGTIGYCRLWIPGFAELAQPLYAATRGGNDPLEWGEKEEEAFQSLKLALTQPPALALPSLDKPFQLFIEETGGAAKGVLTQALGPWKRPVAYLSKRLDPVAAGWPRCLRAIAAAALLTREASKLTFGQDIEITSSHNLESLLRSPPDRWLTNARITQYQVLLLDPPRVRFKQTAALNPATLLPETDDTLPIHHCLDTLDSLTSTRPDLTDQPLAQAEATLFTDGSSYIPHGKRYAGAAVVTLDSVIWAEPLPIGTSAQKAELIALTKALEWSKDKSVNIYTDSRYAFATLHVHGMIYKERGLLTAEGKAIKNAPEILALLTAVWLPKRVAVMHCRGHQKDDAPTSAGNRRADEVAREVAIRPLSIQATVFDAPDMP

SEQ ID NO: 461 - protein, 679 aa, Reticuloendotheliosis virus
TAPLEEEYRLFLEAPIQNVTLLEQWKREIPKVWAEINPPGLASTQAPIHVQLLSTALPVRVRQYPITLEAKRSLRETIRKFRAAGILRPVHSPWNTPLLPVRKSGTSEYRMVQDLREVNKRVETIHPTVPNPYTLLSLLPPDRIWYSVLDLKDAFFCIPLAPESQLIFAFEWADAEEGESGQLTWTRLPQGFKNSPTLFDEALNRDLQGFRLDHPSVSLLQYVDDLLIAADTQAACLSATRDLLMTLAELGYRVSGKKAQLCQEEVTYLGFKIHKGSRSLSNSRTQAILQIPVPKTKRQVREFLGTIGYCRLWIPGFAELAQPLYAATRGGNDPLVWGEKEEEAFQSLKLALTQPPALALPSLDKPFQLFVEETSGAAKGVLTQALGPWKRPVAYLSKRLDPVAAGWPRCLRAIAAAALLTREASKLTFGQDIEITSSHNLESLLRSPPDKWLTNARITQYQVLLLDPPRVRFKQTAALNPATLLPETDDTLPIHHCLDTLDSLTSTRPDLTDQPLAQAEATLFTDGSSYIRDGKRYAGAAVVTLDSVIWAEPLPIGTSAQKAELIALTKALEWSKDKSVNIYTDSRYAFATLHVHGMIYRERGLLTAGGKAIKNAPEILALLTAVWLPKRVAVMHCKGHQKDDAPTSTGNRRADEVAREVAIRPLSTQATISDAPDMP

SEQ ID NO: 462 - protein, 679 aa, Reticuloendotheliosis virus
TAPLEEEYRLFLEAPIQNVTLLEQWKREIPKVWAEINPPGLASTQAPIHVQLLSTALPVRVRQYPITLEAKRSLRETIRKFRAAGILRPVHSPWNTPLLPVRKSGTSEYRMVQDLREVNKRVETIHPTVPNPYTLLSLLPPDRIWYSVLDLKDAFFCIPLAPESQLIFAFEWADAEEGESGQLTWTRLPQGFKNSPTLFDEALNRDLQGFRLDHPFVSLLQYVDDLLIAADTQAACLSATRDLLMTLAELGYRVSGKKAQLCQEEVTYLGFKIHKGSRTLSNSRTQAILQIPVPKTKRQVREFLGTIGYCRLWIPGFAELAQPLYAATRGGNDPLVWGEKEEGAFQSLKLALTQPPALALPSLDKPFQLFVEETGGAAKGVLTQALGPWKRPVAYLSKRLDPVAAGWPRCLRAIAAAALLTREASKLTFGQDIEITSSHNLESLLRSPPDRWLTNARITQYQVLLLDPPRVRFKQTAALNPATLLPETDDTLPIHHCLDTLDSLTSTRPDLTDQPLAQAEATLFTDGSSYIRDGKRYTGAAVVTLDSVIWAEPLPIGTSAQKAELIALTKALEWSKDKSVNIYTDSRYAFATLHVHGMIYRERGLLTAGGKAIKNAPEILALLTAVWLPKRVAVMHCKGHQKDDAPTSTGNRRADEVAREVAIRPLSTQATISDAPDMP

SEQ ID NO: 463 - protein, 679 aa, Reticuloendotheliosis virus
TAPLEEEYRLFLEAPIQNVTLLEQWKREIPKVWAEINPPGLASTQAPIHVQLLSTALPVRVRQYPITLEAKRSLRETIRKFRAAGILRPVHSPWNTPLLPVRKSGTSEYRMVQDLREVNKRVETIHPTVPNPYTLLSLLPPDRIWYSVLDLKDAFFCIPLAPESQLIFAFEWADAEEGESGQLTWTRLPQGFKNSPTLFDEALNRDLQGFRLDHPFVSLLQYVDDLLIAADTQAACLSATRDLLMTLAELGYRVSGKKAQLCQEEVTYLGFKIHKGSRTLSNSRTQAILQIPVPKTKRQVREFLGTIGYCRLWIPGFAELAQPLYAATRGGNDPLVWGEKEEESFQSLKLALTQPPALALPSLDKPFQLFVEETGGAARGVLTQALGPWKRPVAYLSKRLDPVAAGWPRCLRAIAAAALLTREASKLTFGQDIEITSSHNLESLLRSPPDRWLTNARITQYQVLLLDPPRVRFKQTAALNPATLLPETDDTLPIHHCLDTLDSLTSTRPDLTDQPLAQAEATLFTDGSSYIRDGKRYTGAAVVTLDSVIWAGPLPIGTSAQKAELIALTKALEWSKDKSVNIYTDSRYAFATLHVHGMIYRERGLLTAGGKAIKNAPEILALLTAVWLPKRVAVMHCKGHQKGDAPTSTGNRRADEVAREVAIRPLSTQATISDAPDMP

SEQ ID NO: 464 - protein, 679 aa, Reticuloendotheliosis virus
TAPLEEEYRLFLEAPIQNVTLLEQWKREIPKVWAEIIPPGLASTQAPIHVQLLSTALPVRVRQYPITLEAKRSLRETIRKFRAAGILRPVHSPWNTPLLPVRKSGTSEYRMVQDLREVNKRVETIHPTVPNPYTLLSLLPPDRIWYSVLDLKDAFFCIPLAPESQLIFAFEWADAEEGESGQLTWTRLPQGFKNSPTLFDEALNRDLQGFRLDHPFVSLLQYVDDLLIAADTQAACLSATRDLLMTLAELGYRVSGKKAQLCQEEVTYLGFKIHKGSRTLSNSRTQAILQIPVPKTKRQVREFLGTIGYCRLWIPGFAELAQPLYAATRGGNDPLVWGEKEEEALQSLKLALTQPPALALPSLDKPFQLFVEETGGAAKGVLTQALGPWKRPVAYLSKRLDPVAAGWPRCLRAIAAAALLTREASKLTFGQDIEITSSHNLESLLRSPPDRWLTNARITQYQVLLLDPPRVRFKQTAALNPATLLPETDDTLPIHHCLDTLDSLTSTRHDLTDQPLAQAEATLFTDGSSYIRDGKRYTGAAVVTLGSVIWAEPLPIGTSAQKAELIALTKALEWSKDKSVNIYTDSRYAFATLHVHGMIYRERGLLTAGGKAIKNAPEILALLTAVWLPKRVAVMHCKGHQKDDAPTSTGNRRADEVAREVAIRPLSTQATISDAPDMP

SEQ ID NO: 465 - protein, 766 aa, Simian foamy virus
TTLVPLQDYQERLLKQTAFPEQHRKRLQTLFLKYDALWQHWENQVGHRRIKPHHIATGTVAPRPQKQYPINPKAKPSIQIVINDLLKQGVLIQQNSTMNTPVYPVPKPDGKWRMVLDYREVNKTIPLIAAQNQHSAGILSSIYRGKYKTTLDLSNGFWAHSITPESYWLTAFTWQGKQYCWTRLPQGFLNSPALFTADVVDLLKEIPNVQAYVDDIYISHDDPEEHLEQLEKVFSILLNAGYVVSLKKSEIAQYEVEFLGFNITKEGRGLTETFKQKLLNITPPKDLKQLQSILGLLNFARNFIINFSELVKPLYSIISNAQGKYITWTEENSNQLQHIIDVLNMAENLEERNPETRLIVKVNASPSAGYIRFYNEHSKRPIMYINYVFTKAEIKFTPTEKLLTTIHKALIKALDIAMGQEILVYSPITSMTKIQKTPLPERKALPIRWITWMTYLEDPRIFFHYDKTLPELQQIPAVTEDVVYKTKHPSEFQRVFYTDGSAIKHPDITKSHSAGMGIAETQFSPEFKVLNKWSIPLGDHTAQLAEIAAEEFACKKALKITGPVLIVTDSFYVAESANKELPYWQSNGFLNNKKKPLKHVSKWKSIAECLQLKPDITIIHEKGHQPTATSFHTEGNSLADKLATQGSYVVNTNTTPSLDAELDQLLQGQYPKGYPKHYSYKLQEGHVVVERPNGIRIIPPKADRSTIILQAHNIAHTGRDSTFLKVTSKYWWPNLRKDVVKVIRQCKQCLVTNQAVLTAPPILRPE

SEQ ID NO: 466 - protein, 766 aa, Rhesus macaque simian foamy virus
TVLVPLQDYQERLLKQTTLPKEQKDQLEKLFLKYDALWQHWENQVGHRRIKPHNIATGTLAPRPQKQYPINPKAKPSIQIVIDDLLKQGVLIQQNSTMNTPVYPVPKPDGKWRMVLDYREVNKTIPLIAAQNQHSAGILSSIYRGKYKTTLDLTNGFWAHPITPESYWLTAFTWQGKQYCWTRLPQGFLNSPALFTADVVDLLKEVPNVQAYVDDIYMSHDDPQEHLEQLEKVFSILLNAGYVVSLKKSEIAQREVEFLGFNITKEGRGLTETFKQKLLNVIPPKDLKQLQSILGLLNFARNFIPNYSELVKPLYTIVANANGKFISWTEENSNQLQYIISVLNQADNLEERNPETRLILKVNSSPSAGYIRYYNEGSKRPIMYVNYVFSKAEVKFTQTEKMLTTMHKGLIKAMDLAMGQEILVYSPIVSMTKIQKTPLPERKALPVRWITWMTYLEDPRIQFHYDKTLPELQQTPSVTEDVIAKTKHPSEFAMVFYTDGSAIKHPDINKSHSAGMGIAQVQFQPEYKVIHQWSIPLGDHTAQLAEIAAVEFACKKALKISGPVLIVTDSFYVAESANKELSYWKSNGFLNNKKKPLKHVSKWKSIAECLQLKPDITIIHEKGHQQPMTTLHTEGNNLADKLATQGSYVVHCNTTPSLDAELDQLLQGHNPPGYPKQYKYTLEDNKIIVERPNGQRIVPPKSDREKIISMAHNIAHTGRDATFLKVSSKYWWPNLRKDVVKVIRQCKQCLVTNAANLTSPPILRPE

SEQ ID NO: 467 - skipped

SEQ ID NO: 468 - protein, 768 aa, Western lowland gorilla simian foamy virus
TILVPLQDYQSRILEKTALSEEFKKQLQTLFLKYDNLWQHWENQVCHRKIRPHNIATGDYPPRPQKQYPINPKARSSIQVVIDDLLKQGVLVQQNSTMNTPVYPIPKPDGRWGMVLDYREVNKTIPLIAAQNQHSAGILATIVRKKYKTTLVLANGFWAHPITPESYWLTAFIWQGKQYCWTRLPQGFLNSPALFTADVVDLLKEISNVQAYVDDIYLSHDDPQEHLDQLEKVFQILLQAGYVVSLKKSEVAQKTVEFLGFNITKEGRGLTEAFKAKLLDITPPKDLKQLQSILGLLNFARNFILNFAELVKPLYSLISSAKGKYIEWSNENTVQLQTIIKALNNADNLEERIPEKRLIIKVNTSPSAGYVRYYNETGKKPIMYLNYVFSKAELKFTLLEKLLTTMHKALIKAMDLAMGQEILVYSPVVSMTKIQKTPIPERKALPIRWITWMTYLEDPRIQFHYDKTLPELKNIPDVLTENSSKIMIHPSQYNSVFYTDGSAIRSPDPTKSHNAGMGIVQVKFSPELQVINQWSIPLGNHTAQMAEIAAVEFACKKALKITGPVLIITDSFYVAESTNKELPYWKSNGFVNNKKKPLKHVSKWKSIAECLSLKPDITIQHERGHQPIYTSIHTEGNALADKLATQGSYVVNNNDKKPNLDAELDHLIQGKYPKGYPKQYTYYMEDGKVKVNRPEGTKIIPPSLERAGIVQKAHNLAHTGREATLLKIANLYWWPNMRKDVVRQLGRCQQCLVTNAFNQTSGPILRPT

SEQ ID NO: 469 - protein, 767 aa, Eastern chimpanzee simian foamy virus
TILVPLQEYQEKILSKTALPEDQKQQLKTLFVKYDNLWQHWENQVGHRKIRPHNIATGDYPPRPQKQYPINPKAKPSIQIVIDDLLKQGVLTPQNSTMNTPVYPVPKPDGRWRMVLDYREVNKTIPLTAAQNQHSAGILATIVRQKYKTTLDLANGFWAHPITPESYWLTAFTWQGKQYCWTRLPQGFLNSPALFTADVVDLLKEIPNVQVYVDDIYLSHDDPKEHVQQLEKVFQILLQAGYVVSLKKSEIGQKTVEFLGFNITKEGRGLTDTFKTKLLNITPPKDLKQLQSILGLLNFARNFIPNFAELVQPLYNLIASAKGKYIEWSEENTKQLNMVIEALNTASNLEERLPEQRLVIKVNTSPSAGYVRYYNETGKKPIMYLNYVFSKAELKFSMLEKLLTTMHKALIKAMDLAMGQEILVYSPIVSMTKIQKTPLPERKALPIRWITWMTYLEDPRIQFHYDKTLPELKHIPDVYTSSQSPVKHPSQYEGVFYTDGSAIKSPDPTKSNNAGMGIVHATYKPEYQVLNQWSIPLGNHTAQMAEIAAVEFACKKALKIPGPVLVITDSFYVAESANKELPYWKSNGFVNNKKKPLKHISKWKSIAECLSMKPDITIQHEKGHQPTNTSIHTEGNALADKLATQGSYVVNCNTKKPNLDAELDQLLQGHYIKGYPKQYTYFLEDGKVKVSRPEGVKIIPPQSDRQKIVLQAHNLAHTGREATLLKIANLYWWPNMRKDVVKQLGRCQQCLITNASNKASGPILRPD

SEQ ID NO: 470 - protein, 767 aa, Spider monkey simian foamy virus
TIKLPVQDLKNTLVSQANIGKEDKIKLAKLLDKYDDLWQQWDNQVGNRKITPHNIATGTYPPKPQKQYHINPKAKPSIQIVINDLLKQGVLRQSTSPMNTPVYPVPKPDGKWRMVLDYRAVNKTIPLIAAQNQHSLGILTNLIRHKYKSTIDLSNGFWAHPITEDSQWITAFTWEGKQHVWTRLPQGFLNSPALFTADVVDILKEVPGVSVYVDDIYISSPTMEEHFQVLDSIFRKLLETGYIVSLKKSALARYEVNFLGFVISETGRGLTSEFRERLQEITPPTTLKQLQSILGFLNFARNFVPNFSELVQPLYQLISTASGNFIQWTAEHTLRLNELISALNHAGNLEQRRGDSPLVVKVNASDKTGYIRYYNDNSLIPIAYASHVFSTAELKFTPLEKLLVTMHRALLKGIDLALGQPIKVYSPIASMQKLQKTPIPERKALSTRWVTWLSYLEDPRITFYYDKTLPDLKHVPASTDNNIITLLPITEYEAVFYTDGSAIKSPKTEQTHSAGMGIVMVVYTPEPNITQQWSIPLGDHTAQYAEISAVEFACKKASLLQGPVLIVTDSDYVARSANKELPFWRSNGFLNNKKKPLKHISKWKNISDSLLLKRNITIVHEPGHQPSKTSIHTLGNSLADKLAVQGSYSVNTINKIPSLDAELNQILEGNLPKGYPKQYKYVLKNNELIVQRPEGDKIIPPKADRLPLVKTAHELAHTGREATLLKLQTTHWWPNMRKDIITVLRQCKPCLQTDSTNLTPIPPVSQP

SEQ ID NO: 471 - protein, 767 aa, Squirrel monkey simian foamy virus
TEKLPIQDYKDNIVKRADITKEEKGMLYKLLDKYDPLWQQWENQVGNRQITPHIIATGTINPKPQKQYHINPKAKPSIQIVINDLLKQGVLKQQNSIMNTPIYPVPKTEGKWRMVLDYRAVNKTIPLIAAQNQHSAGILTNLVRQKYKSTIDLSNGFWAHPIDQDSQWITAFTWEGKQYVWTRLPQGFLNSPALFTADVVDLLKEIPNVNVYVDDIYVSTETINQHFQVLDKIFQKLLQAGYVVSLKKSNLCRYEVTFLGFTISKYGRGLTEEFQEKLRNISPPNSLKQLQSILGLLNFARNFIPNFSELIKPLYELISTAQGQSISWEPKHSQALNNLIIALNHADNLEQRNGEVPLVIKINASNTTGYIRFYNKNGKRPIAYASHVFNHTEQKFTPVEKLLTTMHKAIIKGIDLAIGQPIEIYSPIVSMQKLQKITLPERKALSTRWLSWLSYIEDPRFLFIYDKTLPDLKEMPPTQTDDYNPMLPLHQYLAVFYTDGSSIKSPDPTKTHSSGMGIVQAIYEPNFQIKHQWSIPLGDHTAQYAEIAAVEFACKKALQVTGPVLIVTDSDYVARSVNNELNFWRSNGFVNNKKKPLKHISKWKSISESLLLHKNITIVHEPGHQPSSTSVHTQGNALADKLAVQGSYTINNITIKPSLDTELRAVLEGKLPKGYPKNLKYEYNSPNLIVIRKEGQRIIPPLSDRPKLVKQAHELAHTGREATLLRLQNQYWWPKMRKDVSHCLRTCMPCLQTNSTNLTTTRPFQQI

SEQ ID NO: 472 - protein, 772 aa, Equine foamy virus
TIKIDIQKQQEQLLHTTNLSSEGKKYLKDLFIKYDNLWQKWENQVGHRRITPHKIATGTLNPKPQKQYRINPKAKADIQIVIDDLLKQGVLKQQTSPMNTPVYPVPKPDGRWRMVLDYRAVNKVTPAIATQNCHSASLLNTLYRGQYKTTLDLANGFWAHPIQESDQWITSFTWNGKSYVWTTLPQGFLNSPALFTADVVDLLKDIPNVEVYVDDVYFSNDTEEEHLKTMDLLFQKLQTAGYIVSLKKSKLGQHTVDFLGFQITQTGRGLTDSYKSKLLDITPPNTLKQLQSILGLLNFARNFIPNYSELITPLYQLIPLAKGIYIPWETKHTAILQKIIKELNASENLEQRKPDVELIVKVHVSPTAGYIKFANKGSIKPIAYHNVVFSKTELKFTITEKVMTTIHKALLKAFDLAMGQPIWVYSPIHSMTRIQKTPLTERKALSIRWLKWQTYFEDPRLIFHYDDTLPDLQNLPQTTLGNEVDILPLSEYEVVFYTDGSSIKSPKKDKQHSAGMGIIAVRYQPQMNIIQEWSIPLGDHTAQFAEIAAFEFALKQAIRKMGPVLIVTDSDYVAKSYNQELDFWVSNGFVNNKKKPLKHVSKWKSIADCKKHKADIHVIHEPGHQNDLQSPYAMGNNAADKLAVKASYTVFSVQTLPSLDAELHQLLDKQTPNPKGYPSKYEYTLRDGQVYVKRTDGEKIIPSKDDRVKILELAHKGPGSGHLGKNTMYIKILNKYWWPNLIKDISKYIRTCTNCIITNTDNVPNKSYIVQE

SEQ ID NO: 473 - protein, 776 aa, Bovine foamy virus
TIKIDVESQKHTLITESTLSPQGQMRLKKLLDQYQALWQCWENQVGHRRIEPHKIATGALKPRPQKQYHINPRAKADIQIVIDDLLRQGVLRQQNSEMNTPVYPVPKADGRWRMVLDYREVNKVTPLVATQNCHSASILNTLYRGPYKSTLDLANGFWAHPIKPEDYWITAFTWGGKTYCWTVLPQGFLNSPALFTADVVDILKDIPNVQVYVDDVYVSSATEQEHLDILETIFNRLSTAGYIVSLKKSKLAKETVEFLGFSISQNGRGLTDSYKQKLMDLQPPTTLRQLQSILGLINFARNFLPNFAELVAPLYQLIPKAKGQCIPWTMDHTTQLKTIIQALNSTENLEERRPDVDLIMKVHISNTAGYIRFYNHGGQKPIAYNNALFTSTELKFTPTEKIMATIHKGLLKALDLSLGKEIHVYSAIASMTKLQKTPLSERKALSIRWLKWQTYFEDPRIKFHHDATLPDLQNLPVPQQDTGKEMTILPLLHYEAIFYTDGSAIRSPKPNKTHSAGMGIIQAKFEPDFRIVHLWSFPLGDHTAQYAEIAAFEFAIRRATGIRGPVLIVTDSNYVAKSYNEELPYWESNGFVNNKKKTLKHISKWKAIAECKNLKADIHVIHEPGHQPAEASPHAQGNALADKQAVSGSYKVFSNELKPSLDAELEQVLSTGRPNPQGYPNKYEYKLVNGLCYVDRRGEEGLKIIPPKADRVKLCQLAHDGPGSAHLGRSALLLKLQQKYWWPRMHIDASRIVLNCTVCAQTNSTNQKPRPPLVIP

SEQ ID NO: 474 - protein, 771 aa, Feline foamy virus
TIKLNLEEQQRTLLNNSILSKKGKEELKRLFEKYNALWQSWENQVGHRKIRPHKIATGTVKPTPQKQYHINPKAKPDIQIVINDLLKQGVLIQKESTMNTPVYPVPKPNGHWRMVLNYRAVNKVTPLIAVQNQHSYGILGSLFKGKYKTTIDLSNGFWAHPIVPEDYWITAFTWQGKQYCWTVLPQGFLNSPGLFTGDVVDLLQGIPNVEVYVDDVYISHDSEKEHLEYLEILFNRLNEAGYIVSLKKSNIANSSVDFLGFQITNEGQGLTDTFKEKLENITAPTTLKQLQSILGLLNFARNFIPDFTELIAPLYALIPKSTKNYVPWQIEHSTTLETLIAKLNEAKYLQGRRGDKTLIMKVNASYTTGYIRYYNEGEKKPISYVSIVFSKTELKFTKLEKLLTTVHKGLLKALDLSMGQNIHVYSPIVSMQNIQKTPQTAKKALASRWLSWLSYLEDPRIRFFYDPQMPALKDLPAVNIGENNKKHPSNFQHIFYTDGSAITSPTKEGHLNAGMGIVYFINRDGNLQKQQEWSISLGNHTAQFAKIAAFEFALKKCLPLGGNILVVTDSNYVAKAYNEELDVWASNGFVNNRKKPLKHISKWKSVANFKKLRPNVVVTHEPGHQKLNSSPHAYGNNLADQLATQASFKVQHDKNSKLDTEQIKAIQARQNNERVPVGYPKQYTYELRNNKCMVLRKDGWREIPPSRERYKLIKEAHDISHASREAVLLKIQENYWWPKMKKDVSSFLSTCNVCKMVNPLNLKPISPQAIV

SEQ ID NO: 475 - protein, 463 aa, Callorhinchus milii
DIEKLIQNQIDKTNINKDKLRELLLNKREILAKSLTDCGKVKSNAEIRGKLHHKQRQYKIRREDKETIGKIINNLMEQGVIKKCRSPTNSPIFLKKKPDGSWRLLLDCKALNECTNPKQGQSISSHGSIEKLTREKYHTTLNIANGFWSIPIVEKDQFKTAFTYQGQQYQWTRLPEGWCNSTVIFNEAIRRVLDDNPKITRFGGVIHFSNDNAESHIKLLKQILEKLDNHGLKIDLRKSQIGRYAVDFLGHQISETEDRLSRKFKEEVSQVKPPKTRKELQSVLGKFNFAREFVINYAGKAASLFKLTNKEPFQWDTNAQECLNQLQQDIQKAVPHSTRKPKSSLILDIYVSKDSSVTAVKQKSVTGEETLKYLSFNFSKAEKKFAKDERLLATLFCTLKQTCQMVTSKEKITVRTSYPELAGVTRESQRNHKALKCRWKKWESLLYDQRISFELRNGIEENE

SEQ ID NO: 476 - protein, 714 aa, Poecilia latipinna
VDVPAVTKQKIEESDFSPAGKKKLREIIASAKVARFKNDCGDLGPRFVHHIEGGVHPPVRQYPLNPGAVEEMDKIVKELGSLGIIREELNPITNSPIQAVKKPESAGGGWRPVINFKALNRRTIANRASLINPQGTLKTLRVKKFKSCIDLANGFFSLRLARQSQGKTAFTHKGKSYVWQRLPQGYKNSPNVFQSAVMEVLGDVGATVYIDDVFIADDTEEEHLERLRKVIENLTKAGLKLNLKKCQFGQFQVNYLGFQVTSDLGLSDGYREKMMNIQPPQSENELQKILGLCNYVRDHVPNYQKYAKPLYNCLKKSVENEGGGKRPWVWTAANQRDLEDLKKAIQAAVRLEPRSLSDRLVAEINCEEDDAMIKVSNENGGLVTLWSYTLTSVEKKYPQEEKELAVLARYWSVLKDLAQGQPVKVITQSQVHKYLRKGTVESTKATNARWGRWEDILLDPELEIGPAQPTNKKRQQETPEKPGQPEWTLYTDGSKKESDQVAYWGFILKQDGKERCRQKGKAPGSAQAGEVTAILEGLLELGKRKIKSARLVTDSYYCAQALKEDLAIWEENGFETAKGKPVAHRDLWKKIAELKMQLELEVEHQRAHTHEGAHWRGNDEVDCYVQQRKIVFVGIEKWDSTPRGREVPEEYVDEVVRSVHEALGHAGVRPTRKELEEHELWIPVKQVQRVLRDCEVCGKYNAGRRGQRLEGLTI

SEQ ID NO: 477 - protein, 715 aa, Larimichthys crocea
VNIPEATEQKLEESDFSPEGKEKLRKIITRATVARFKNDCGDLGSKYVHTIEGGVHPPVRQYPLNPGAVEEMDKIVTELSALDIIREEPNPITNSPIQAVKKPEAAGGGWRPVINFKALNRRTVANRASLINPQGALKTLQVKRFKSCIDLANGFFSLRLAKQSQGKTAFTHKGKAYVWQRLPQGYKNSPNVFQAAVMDVLKDLGVTIYIDDVFLADDTEEEHLQRLRQVVERLTEAGLKLNLKKCQFGQFRVNYLGFQVAADLGLSDGYREKLNQVRPPTSENDLQKILGLCNYVRDHVPNYQKYAKPLYACLKKKGEESEEETPKKWSWTATDQQNLGRLKAVIQDAIRLEPRSLTTRLVAEVSCEDDDAVVKVKNEGGGMVTLWSYTLSSVERKFPQEEKELAVLARYWGTMKDLAQGQGIKVITQSQVHRYLRKETIESTKATNTRWGRWEDILLDPDLEIGPAQPANRKAQKPQETEEKSYEWILYTDGSRKGQDDTAYWGYILKQDGKEQFRQKGRVSGSAQAGEVTAILEGLLELEKRKVKTARIITDSYYCAQALKEDLTIWEENGYEGAKGKMVAHQDLWKKIAELRLKMCLDVVHQKAHGKEGAHWKGNDEVDRYVQQRRIVFVGREKWEQTPKGRVVPESSVVEVVQAVHEALGHVGTMSTRKELEKQQLWIPVGRVRQVLKDCNVCGRYNAGRRGKRVDGLTI

SEQ ID NO: 478 - protein, 672 aa, Larimichthys crocea
VNIPEATEQKLEESDFSHEGKEKLRKIITRATVARFKNDCGDLGSKYVHTIEGGVHPPAVKKPEAAGGGWRPVINFKALNRRTVANRASLINPQGALKTLQVKRFKSCIDLANGFFSLRLAKQSQGKTAFTHKGKAYVWQRLPQGYKNSPNVFQAAVMDILKDLGVTIYIDDVFLADDTEEEHLQRLRQVVERLTEAGLKLNLKKCQFGQFRVNYLGFQVAADLGLSDGYREKLNQVRPPASENDLQKILGLCNYVRDHVPNYQKYAKPLYACLKKKGEESEEGTPKKWSWTATDQQNLGRLKAVIQDAIRLEPRSLGVAEVSCEDDDAVVKVKNEGGGMVTLWSYTLSSVEKKFPQEEKELAVLARYWGTMKDLAQGQGIKVITQSQVHRYLRKETIESTKATNTRWGRWEDILLDPDLEIGPAQPANRKAQKPQETEEKSYEWILYTDGSRKGQDDTAYWGYILKQNGKEQFRQKGLVSGSAQAGEVTAILEGLLELEKRKVKTARIITDSYYCAQALKEDLTIWEENGYEGAKGKMVAHQDLWKKIAELRLKMCLDVVHQKAHGKEGAHWKGNDEVDRYVQQRRIVFVGREKWEQTPKGRVVPESSVVEVVQAVHEALGHVGTMPTRKELEKQQLWIPVGRVHQVLKDCDVCGRYNAGRRGRRVDGLTI

SEQ ID NO: 479 - protein, 548 aa, Scophthalmus maximus
VKKFKSCIYLANRFFSLRLAKQSQGKTAFTHKGKAYVWQRLPQGYKNSPNVFQSAVMDVLSGLGATVYIDDVFIADDTEEEHLERLQKVVERISAAGLKLNLKKCQFGQFQVNYLGFQVAMDLGLSDGYREKINQITPPTTLNELQKILGLCNYVRDHVPGYQQYAKPLYACLKTKEVLRNGKPDRNWNWTATDQDNLRKLKDAIQQAVRLEPRSLTTKLVAEVSCEEEDAVLRVSNEGGGLVTLWSYTLSSVEKKYPPEEKELAVLAKYWGALKDLAQGQTIKVTTRSQVHRFLRKGTVESTKATNTRWGRWEDILLDPDLEISPEKLPSKKTTKEETTDKKPYEWTLYTDGSKKGQDDNAYWGFILKLNEKESFRQRGRALGSAQAGEVTAIMEGLLELGKRKIKRVRIITDSFYCAQALQEDLTIWEENGFESAKGKMVAHQDTHWRGNNEVDRYVQQRKVVIVGIEKWDKTPKGRVVPEEFVKEVVQAVHEALGHAGTIPTRKELEKQDLWIPEKQIRRILKDCETCGKFNAGRRGQRVDGQTI

SEQ ID NO: 480 - protein, 374 aa, Scyliorhinus torazame
MKEVLIGANLAIGKNDTGLISKRFQHTIHGGQHRPQKQYPLTRGAKSELEIAIKELEQQGIIQKVTYALTNSSLQVVSKPDGTFRMITNYKALNKVTKKDKRYLINPQTTLEQVAGKIYLTSIDLANGFWSVPLDPDSREKTAFTFGTKHYVYCRLPQGYVNSPNHFQAIVRELMKDDLALVYIDDVLIGDDDQDKHVERVARIIKTLSEAGFKIGLKKCQIGRSEVNYLGYSVSKEGREACIEMRKKVAEITAPVSRKGVKKIMGILGYLRPVVKDFSLYAKPIYETLKGDFIWSSEAQGGLDQLKTAVAISGPLVGRQEEDDLSIKLDIYKNGYGMVLVNHSNQTLIKHLTGIWPRAEQKCSDIEKCLAAII

SEQ ID NO: 481 - protein, 691 aa, Pimephales promelas
VDLEHEINRLVKETLLPKNELRKLLEKYRNSFAKSKNDCGKLDDKYEYTILGGIPAPQRQYPLNKAAYPEIRGTLNELLRKGIISVGENCPTNAPIQAVIKIDGSYRLVCNFKALNRLTVPDTRYLINARDATNCLDDGKILSKIDLANGFWSVPLAKDSRARTAFTFEGKQYVFNRLPMGFCNAPNAFQAIILEILEGLPVTAYIDDVLIATQTTEEHMRVLSETIRKLADAGFLLNLKKLELGKENVNFLGFEISGAERGIAKSTQEKLEELKKERITNLRQLQSLLGRLNFVRDLIPGYSAKAKILYKATAGKDFHWDDRLESIKCDIINMALASGRIVRRNPDKNLRVKIDNTPEEMELILYNEGDTKSPVMFISHEKPANHKKHENMSPVDILATIARNLLVIKALAAEKLIIIVAKGEGIDLLAREAKNLVNENKRVHVFTWSKWIKIIDDNQFEFRNEKSPKKDRRTVIDPEQICYFTDGSSEKGETWWGFMVKLKGKIIHKEKGRLDNDKSAQEAEVTAVAKAIMHMRDNNRKKCVLVTDSEYVYLGIVQNLSTWEQNNFNNAKGKPLAQVELWKVISECAKVVQPRVLHQSSHTVQKTPAAVGNREVDQYVRVRAITKESEGNLLQELHDKLNHPSTTYVAKYCKQLGLHVQNLKTSYQKIKIKCPDCRKVMSSVHHDFGHI

SEQ ID NO: 482 - protein, 525 aa, Medicago truncatula
FPVYKAEEEENEEIPDEISRLLEQERKTIQPYGDELEVINLGTKEDKKEIKVGASLETSVKKQVIELLKEYVDVFAWSYRDMPGLDTDIVVHHLPLKPECPPVKQKLRRTRPDMALKIKEEVQKQIDAGFLVTSNYPQWLANIVPVPKKDGKVRMCVDYRDLNKASPKDDFPLPHIDVLVDSTAKSKVFSFMDGFFGYNQIKMAPEDREKTSFITPWGTFCYKVMPFGLINAGATYQRGMTTLFHDMIHKEIEVYVDDMIVKSITEEDHVKYLQKMFQRLRKYKLRLNPNKCTFGVRSGKLLGFIVSQKGIEVDPDKVKAIREMPAPRTEKEVRGFLGRLNYISRFISHMTATCGPIFKLLRKEQGIVWTEDCQKAFDNIKKYLLEPPILIPPIEGRPLIMYLTVLENSMGCVLGQQDETGRKEHAIYYLSKKFTECESRYSILEKTCCALAWAAKRLRHYMINHTTWLVSKMDPIKYIFEKPALTGRIARWQMLLSEYDIEYRSQKAIKGSILADHLAHQPLED

SEQ ID NO: 483 - protein, 454 aa, Oryza sativa
FSSVENRREEQILFDVVNIPYNYNAIFGRATLNKFKAISHHNYLKLKMPGPKGVIVVKGLQPSAASKRDLAIINRAVHNVETEPHERPKHTPKPTPHGKVAKVQIDDFDPTKLVSLRSPRLKLRKMSADRQEAAKAEIHMNPLNIPKTSFVTPFGTFCQLRMPFGLRNAGATFARLVYKVLGKQLGRNVKAYVDDIVVKIHKAFDHANNLQETFDSLRAAGIKLNPEKCVFSVRAGKLLGFLVSERGIEANPEKIDAIQQMKPPSSVHEVQKLAGRIAALSRFLSKAAERGLPFFKTLRGAGKFNWTPECQAAFDKLKQYLQSPPVLISPPLGSELLLYLAASPVAVSAALVQETESGQKPVYFVSEALQGAKTRYIEMEKLAYALVMASRKLKHYFQAHKVIVPSQYPLGEILRGKEVTGRLSKWAAELSPFDLHFVARSAIKSQVLADTTEY

SEQ ID NO: 484 - protein, 405 aa, Danio rerio
VNPLSAPVLREEIAALLAKGAIEPVPPAEMESGFYSPYFIVPKKSGGSRPILDLRVLNRCLHKLPFRMLTQRRILQCVRPRDWFAAIDLKDAYFHVSILPRHRQFLRFAFEGRAWQYKVLPFGLSLSPRVFTKLAEGALAPLRLAGIRILSYLDDWLILAHSREQLIVHRDEVLRHLRLLGLQVNREKSKLAPVQRISFLGMELDSITMRLLGHMASAAAVTPLGLLHMRPLQHWLHDRVPRRAWHAGTHRVSVTALCRRALSPWNDPSFLQAGVPLGQASSHVVVSTDASNTGWGAVCRGHAAAGLWKGAQLHWHINRLELLAVFLALHRFLPVLERQHVLVRTDSTAAAAYINRMGGMRSRRMSQLARRLLLWSHPRLKSLRAIHVPGTLNRAADALSRQLLR

SEQ ID NO: 485 - protein, 236 aa, Saccharimonas aalborgensis
NTEELEKLLADYPAEARVFCALEPKRDGTSRPIIKPNKPLNQWLKRMKRALYRQRRDWPTFIHGGVKKRSYVSFARPHANKNTVITIDIKDCFGSITQSEVQQALVSKLGLPDGLASRLAAKLCYKRRIPQGFATSSYLTNLYLNDTLLKINRQLKRKQIDMTVYVDDIALSGQKVDSAVIINLVTLELSRARLAISKAKVKVMRSHSPQIICGLVVNKGVALSRQKRKEIFSDIA

SEQ ID NO: 486 - protein, 252 aa, Acinetobacter baumannii
FHITSKKRLAILLHSSVKELNNIVRSKDQMYQYFNETQTDNSGNIIKVRPIQNPHDRLKQIHSRIGKFLGNLKAPEYLHSKRSKSAISNAKAHVGIKGHTLNIDITDFYPSTSRAKVQAFFGYTLQYPTDIAKYLSEICTVKNCLPTGSPLSSALAFWANKSMFDEIYRVAKSRAITMTVYVDDISFTGRAVNQNFLKKIIQIVGKYQHKIKQEKIKFFPEYSVKFVTGVAILNGRLQPAHRHYRDIRVLQK

SEQ ID NO: 487 - protein, 292 aa, Parabacteroides distasonis
ARKENYYKAFDHASKNKHGKKAIIKFEADLEKNLSDLLYSFENGTFVTSPYRFMTVHEPKKRLIGMLPFPDHVQHWAMLNEVEDYFTRSFSAYTYGGVKGRGPHAYMRMIRKVLRKYPERTTDYLLCDIHHFYPTVNHPVLKSQLRTRIKDNHLLRRLDEIIDSVEGDTGMFPGTKLAQFFSLVYLYLFDHDLKRCFHVGECPALVEYYTKRYIEESIATAKTEHDYEELSKGIQYLSDRFKGYLNRLDFCYRLADDVLILHEDTVFLHLVIEWIGLYYANELRIGLNPRWK

SEQ ID NO: 488 - protein, 294 aa, Aliicoccus persicus
FSDSLPPIFSSEELSLKESNINVSKDYLSKNGSNKRSKLINFSIPKNSSFRRTLSIVHPLHYIKFANLIDEQWENISKHFEKSSVSLTKIIKNNSKLEREHGFEAMRYKQIENLSLNRFILKIDINRYYPSIYTHSIPWALHGKKYSKLNISEENLGNNLDTLTRNMQDGQTIGIPIGPFSSDIIQEIIGTAIDEDFSKKMEYKVPGYRYTDDMEYYFKNLNEANNALSVMNNVLKNYELDLNSEKTVIEKIPMVLEKEWIRSLKNFRFNKNYSKKNVRKEKELLIEYFNSIFN

SEQ ID NO: 489 - protein, 434 aa, Mustela putorius
VPPALWGSRHNQRRFLRNVKKFISLGKHAKLSPQELTWKMKVQDCAWLRGSPGACSVPAAEHRRREGVLARLLCWLMGTYVVELLRSFFYVTETTFQKNRLFFYRKSVWSPLQTLGVRQHCTSVRLRELSAAEVRRQHEARATLLTSRLRFLPKPGGLRPIVNMDYVAGARALCRDKKIQHLTSQVKTLFSVLNYERARRPRLLGASVLGMDDIHRAWHDFVLRVRAQDPAPRLYFVKVDVTGAYDALPQDRLAEVVANVLRPHENTYCLRRYAVVRRTAQGHVRRSFKRHVSTFTDLPPYMRQFVERLQETTSLRDSVVIEQSYSLNEASSGLFQLFLSLVYSHVIRIGGNLLLRLVDDFLLITPHLKRAQAFLRTLVRGVPEYGCSANLQKTAVNFPVEDMALGSTAPLQLPAHCLFPWCGLLLDTQTLEVS

SEQ ID NO: 490 - protein, 414 aa, Cauliflower mosaic virus
LDLKVIKPSKSPHMAPAFLVNNEAEKRRGKKRMVVNYKAMNKATVGDAYNLPNKDELLTLIRGKKIFSSFDCKSGFWQVLLDQESRPLTAFTCPQGHYEWNVVPFGLKQAPSIFQRHMDEAFRVFRKFCCVYVDDILVFSNNEEDHLLHVAMILQKCNQHGIILSKKKAQLFKKKINFLGLEIDEGTHKPQGHILEHINKFPDTLEDKKQLQRFLGILTYASDYIPKLAQIRKPLQAKLKENVPWRWTKEDTLYMQKVKKNLQGFPPLHHPLPEEKLIIETDASDDYWGGMLKAIKINEGTNTELICRYASGSFKAAEKNYHSNDKETLAVINTIKKFSIYLTPVHFLIRTDNTHFKSFVNLNYKGDSKLGRNIRWQAWLSHYSFDVEHIKGTDNHFADFLSREFNKVNSSGGS

SEQ ID NO: 491 - protein, 413 aa, Coccidioides immitis
QHYHDTIQQENQLIPSFFTYIAKLKQDLDSLPDEFFHKRRSKVKDYPQTKKTPVKPLPKISEEEHKQQIDEELCLRCGQPGHKTKFCTNSSNKSQQTDKKNKNQAKTRTAKPMQDPGQTLERQGVNPIKKASRCKQAALLDSGTTVNSISYKLASQLDWDQPETPMEVIEMLNRAEADWYSIYKTQLTITDSMGTIKMKKYYCPSRQRFYKNDILIFSASEKEHEKHVRLVMEYLREYQLFAKLAKCAFKRQTISYLGYIIDNEGIKMDPKQIQVITEWLLLQSFHNIQIFLGFANFYQRFIQKYSVIVALLTDLLKSSEKRRKKEPFLLTPTTRKVFCELQAVFFREPVIQHYNPECRIHLETDTSEHAAEMVQGRPGGTKIIDVLNLLLEAQGDDSSVQARFTKTESQQSE

SEQ ID NO: 492 - protein, 906 aa, Parastagonospora nodorum
AASSLSTLQHVTLQKLNKLDSQRQQFESDKKSILEQVSSVPDHRSKVEALLDGFELHGIAPKQADLSISNLKHFVHQAKHDPSVSASLLKDWQSRLEHELNVKSNKYEYAALFGKLVTEWIKHSTLVKSADVSDGSIAKGRKKMQEQRQSWENYAFVEKEVNQSTIEQYLSDIFGDALQTEKIKKSPLRVLRDSMKEVMDFKSDLDTSEKDFSSNKRFGHSAPHGSRFTIELLQSCIRGVKKADLFTGRKLEMIIDLEKQPAVLKELVDVLNMDVDGLDHWEWDGPVPLNMRRQTNEIHQAILLHFIGKTWAVALKKAFTNFYHSGAWLQAPYRSMPKKIRQRREHFIENSNKSGDSVRNYRRQKYQQEYFMTQLPSNAFEDAREYDAAEGQEKNSHIATKQTMLRLLTTEILLNTKVYGECSVLQSDFKWFGPSLPHDTIFAVLEFFGVPAKWLRFFKRFLEVPVVFAQDGAGAKARVRKCGIPNSHILSDALGEAVLFCLDFAVNRRTKGANIHRFHDDLWFWGQETTSVQAWEAIKEFTEVMGLQLNEEKTGSSIIVADKSRARVPHPNLPEGNLHWGFLELDASAGRWVIDRAQVDEHITELRRQLDACHSVMAWIQAWNSYVGLFFNTNFAQPANCFGRQHNDMIIETFSHIQRSFFGKYGTANVTEYLRSVLKERFQTTDAVPDAFFYFPVELGGLGLNNPSISAFATYQNSSRDPSARIERAFEEEREAYDTAKQRWDAGDVPCPNRETDEPFMSFEEYTAFREETSHPLFEAYMNLLECPVEERVETSDEMYEALRRSDAPHALGSNHYWLWIFNLYAGDLKQRFGGQGVQLGERDLLPVGLVEVLKSEKIYPGSNPFGINQLFTLFRLRKKLRMSVANGWGGYDVTKEPRRTNKDEL

SEQ ID NO: 493 - protein, 862 aa, Astyanax mexicanus
PSTQTEFEKQLQQMLLDADALQSDEERVKLRTVLTKYRASFSQDSMDCGLTHIHMIRIPTHPDAAPAYVRQYKIPLASYGPVQEIIDDLLDKGIIRPCNSTYSAPLWPVLKPNGKWRLTIDYRRLNDQVPLSRWPMTQLEQELPRVRDAKYFSTLDVASGFWTIPVHVEDQHKLAFTFAGRQFTFTRCPFGYSNSPAEFNIFLNKACPDARERGTLIYVDDVLIRNNSLDAHLEEIDHVLDQLTKAGAKISLAKCQWCKTKVNYVGLLVGPDGVLPQPCRAQGIVDIAEPKTIHALRSFLGVCNYSRQFIENFAELAKPLYQLLKQDVPFIWGEAQAQAMQTLKDKLASAPCLTYPDHSREFYLQVGFSEHCVSAGLYQVHDRDKRVVAYASKALMAPELKYSDCEKALLATVWAVKHFSNYLGGQKIIVETNHQPVVFLNSQRIREGVVTNARVASWLMALQSFEVEVRYAQNSRLPLGTDLAACQRCETDIPATSVPIPNLASQKPTNHRYFDPKECENIPTVYVDGCSFRHDQEGLKAGAGIVWLDDNPCEPQQFKLGSQTSQYAEIAAILITIQLAIDQGVKTLVICTDSNYARLSFTCHLPIWKTKGFLTSGRKAVKHTELFTAADYLVVRHDMLVYWKKVRGHSRVPGTDKTYNDQADSLAKRGALEGVSWVFDPLKYPTQPNPTVLAVTRAQAKQTSTTEIPPCAAVSIDPEITDADLITLQDADPDIKSIKAFLLDPTNNPITSQMLEASIPLKQLLDNRAFLKVVKGLLVHVTETHTSPAFVVPPCHRGVMLGHAHDSPSAGHKGIKETYRTLKQVAFWPRMREHVASYIKGCLVCCQFQPANPLHRAPLQRK

SEQ ID NO: 494 - protein, 1368 aa, synthetic construct
MDKKYSIGLDIGTNSVGWAVITDEYKVPSKKFKVLGNTDRHSIKKNLIGALLFDSGETAEATRLKRTARRRYTRRKNRICYLQEIFSNEMAKVDDSFFHRLEESFLVEEDKKHERHPIFGNIVDEVAYHEKYPTIYHLRKKLVDSTDKADLRLIYLALAHMIKFRGHFLIEGDLNPDNSDVDKLFIQLVQTYNQLFEENPINASGVDAKAILSARLSKSRRLENLIAQLPGEKKNGLFGNLIALSLGLTPNFKSNFDLAEDAKLQLSKDTYDDDLDNLLAQIGDQYADLFLAAKNLSDAILLSDILRVNTEITKAPLSASMIKRYDEHHQDLTLLKALVRQQLPEKYKEIFFDQSKNGYAGYIDGGASQEEFYKFIKPILEKMDGTEELLVKLNREDLLRKQRTFDNGSIPHQIHLGELHAILRRQEDFYPFLKDNREKIEKILTFRIPYYVGPLARGNSRFAWMTRKSEETITPWNFEEVVDKGASAQSFIERMTNFDKNLPNEKVLPKHSLLYEYFTVYNELTKVKYVTEGMRKPAFLSGEQKKAIVDLLFKTNRKVTVKQLKEDYFKKIECFDSVEISGVEDRFNASLGTYHDLLKIIKDKDFLDNEENEDILEDIVLTLTLFEDREMIEERLKTYAHLFDDKVMKQLKRRRYTGWGRLSRKLINGIRDKQSGKTILDFLKSDGFANRNFMQLIHDDSLTFKEDIQKAQVSGQGDSLHEHIANLAGSPAIKKGILQTVKVVDELVKVMGRHKPENIVIEMARENQTTQKGQKNSRERMKRIEEGIKELGSQILKEHPVENTQLQNEKLYLYYLQNGRDMYVDQELDINRLSDYDVDHIVPQSFLKDDSIDNKVLTRSDKNRGKSDNVPSEEVVKKMKNYWRQLLNAKLITQRKFDNLTKAERGGLSELDKAGFIKRQLVETRQITKHVAQILDSRMNTKYDENDKLIREVKVITLKSKLVSDFRKDFQFYKVREINNYHHAHDAYLNAVVGTALIKKYPKLESEFVYGDYKVYDVRKMIAKSEQEIGKATAKYFFYSNIMNFFKTEITLANGEIRKRPLIETNGETGEIVWDKGRDFATVRKVLSMPQVNIVKKTEVQTGGFSKESILPKRNSDKLIARKKDWDPKKYGGFLWPTVAYSVLVVAKVEKGKSKKLKSVKELLGITIMERSSFEKNPIDFLEAKGYKEVKKDLIIKLPKYSLFELENGRKRMLASAKQLQKGNELALPSKYVNFLYLASHYEKLKGSPEDNEQKQLFVEQHKHYLDEIIEQISEFSKRVILADANLDKVLSAYNKHRDKPIREQAENIIHLFTLTNLGAPAAFKYFDTTIDRKQYRSTKEVLDATLIHQSITGLYETRIDLSQLGGD

SEQ ID NO: 495 - protein, 1368 aa, synthetic construct
MDKKYSIGLDIGTNSVGWAVITDEYKVPSKKFKVLGNTDRHSIKKNLIGALLFDSGETAEATRLKRTARRRYTRRKNRICYLQEIFSNEMAKVDDSFFHRLEESFLVEEDKKHERHPIFGNIVDEVAYHEKYPTIYHLRKKLVDSTDKADLRLIYLALAHMIKFRGHFLIEGDLNPDNSDVDKLFIQLVQTYNQLFEENPINASGVDAKAILSARLSKSRRLENLIAQLPGEKKNGLFGNLIALSLGLTPNFKSNFDLAEDAKLQLSKDTYDDDLDNLLAQIGDQYADLFLAAKNLSDAILLSDILRVNTEITKAPLSASMIKRYDEHHQDLTLLKALVRQQLPEKYKEIFFDQSKNGYAGYIDGGASQEEFYKFIKPILEKMDGTEELLVKLNREDLLRKQRTFDNGSIPHQIHLGELHAILRRQEDFYPFLKDNREKIEKILTFRIPYYVGPLARGNSRFAWMTRKSEETITPWNFEEVVDKGASAQSFIERMTNFDKNLPNEKVLPKHSLLYEYFTVYNELTKVKYVTEGMRKPAFLSGEQKKAIVDLLFKTNRKVTVKQLKEDYFKKIECFDSVEISGVEDRFNASLGTYHDLLKIIKDKDFLDNEENEDILEDIVLTLTLFEDREMIEERLKTYAHLFDDKVMKQLKRRRYTGWGRLSRKLINGIRDKQSGKTILDFLKSDGFANRNFMQLIHDDSLTFKEDIQKAQVSGQGDSLHEHIANLAGSPAIKKGILQTVKVVDELVKVMGRHKPENIVIEMARENQTTQKGQKNSRERMKRIEEGIKELGSQILKEHPVENTQLQNEKLYLYYLQNGRDMYVDQELDINRLSDYDVDAIVPQSFLKDDSIDNKVLTRSDKNRGKSDNVPSEEVVKKMKNYWRQLLNAKLITQRKFDNLTKAERGGLSELDKAGFIKRQLVETRQITKHVAQILDSRMNTKYDENDKLIREVKVITLKSKLVSDFRKDFQFYKVREINNYHHAHDAYLNAVVGTALIKKYPKLESEFVYGDYKVYDVRKMIAKSEQEIGKATAKYFFYSNIMNFFKTEITLANGEIRKRPLIETNGETGEIVWDKGRDFATVRKVLSMPQVNIVKKTEVQTGGFSKESILPKRNSDKLIARKKDWDPKKYGGFDSPTVAYSVLVVAKVEKGKSKKLKSVKELLGITIMERSSFEKNPIDFLEAKGYKEVKKDLIIKLPKYSLFELENGRKRMLASAGELQKGNELALPSKYVNFLYLASHYEKLKGSPEDNEQKQLFVEQHKHYLDEIIEQISEFSKRVILADANLDKVLSAYNKHRDKPIREQAENIIHLFTLTNLGAPAAFKYFDTTIDRKRYTSTKEVLDATLIHQSITGLYETRIDLSQLGGD

SEQ ID NO: 496 - protein, 1054 aa, synthetic construct
MNQKFILGLDIGITSVGYGLIDYETKNIIDAGVRLFPEANVENNEGRRSKRGSRRLKRRRIHRLERVKKLLEDYNLLDQSQIPQSTNPYAIRVKGLSEALSKDELVIALLHIAKRRGIHKIDVIDSNDDVGNELSTKEQLNKNSKLLKDKFVCQIQLERMNEGQVRGEKNRFKTADIIKEIIQLLNVQKNFHQLDENFINKYIELVEMRREYFEGPGKGSPYGWEGDPKAWYETLMGHCTYFPDELRSVKYAYSADLFNALNDLNNLVIQRDGLSKLEYHEKYHIIENVFKQKKKPTLKQIANEINVNPEDIKGYRITKSGKPQFTEFKLYHDLKSVLFDQSILENEDVLDQIAEILTIYQDKDSIKSKLTELDILLNEEDKENIAQLTGYTGTHRLSLKCIRLVLEEQWYSSRNQMEIFTHLNIKPKKINLTAANKIPKAMIDEFILSPVVKRTFGQAINLINKIIEKYGVPEDIIIELARENNSKDKQKFINEMQKKNENTRKRINEIIGKYGNQNAKRLVEKIRLHDEQEGKCLYSLESIPLEDLLNNPNHYEVDHIIPRSVSFDNSYHNKVLVKQSEASKKSNLTPYQYFNSGKSKLSYNQFKQHILNLSKSQDRISKKKKEYLLEERDINKFEVQKEFINRNLVDTRYATRELTNYLKAYFSANNMNVKVKTINGSFTDYLRKVWKFKKERNHGYKHHAEDALIIANADFLFKENKKLKAVNSVLEKPEIESKQLDIQVDSEDNYSEMFIIPKQVQDIKDFRNFKYSHRVDKKPNRQLINDTLYSTRKKDNSTYIVQTIKDIYAKDNTTLKKQFDKSPEKFLMYQHDPRTFEKLEVIMKQYANEKNPLAKYHEETGEYLTKYSKKNNGPIVKSLKYIGNKLGSHLDVTHQFKSSTKKLVKLSIKPYRFDVYLTDKGYKFITISYLDVLKKDNYYYIPEQKYDKLKLGKAIDKNAKFIASFYKNDLIKLDGEIYKIIGVNSDTRNMIELDLPDIRYKEYCELNNIKGEPRIKKTIGKKVNSIEKLTTDVLGNVFTNTQYTKPQLLFKRGN

SEQ ID NO: 497 - protein, 1053 aa, synthetic construct
MKRNYILGLDIGITSVGYGIIDYETRDVIDAGVRLFKEANVENNEGRRSKRGARRLKRRRRHRIQRVKKLLFDYNLLTDHSELSGINPYEARVKGLSQKLSEEEFSAALLHLAKRRGVHNVNEVEEDTGNELSTKEQISRNSKALEEKYVAELQLERLKKDGEVRGSINRFKTSDYVKEAKQLLKVQKAYHQLDQSFIDTYIDLLETRRTYYEGPGEGSPFGWKDIKEWYEMLMGHCTYFPEELRSVKYAYNADLYNALNDLNNLVITRDENEKLEYYEKFQIIENVFKQKKKPTLKQIAKEILVNEEDIKGYRVTSTGKPEFTNLKVYHDIKDITARKEIIENAELLDQIAKILTIYQSSEDIQEELTNLNSELTQEEIEQISNLKGYTGTHNLSLKAINLILDELWHTNDNQIAIFNRLKLVPKKVDLSQQKEIPTTLVDDFILSPVVKRSFIQSIKVINAIIKKYGLPNDIIIELAREKNSKDAQKMINEMQKRNRQTNERIEEIIRTTGKENAKYLIEKIKLHDMQEGKCLYSLEAIPLEDLLNNPFNYEVDHIIPRSVSFDNSFNNKVLVKQEEASKKGNRTPFQYLSSSDSKISYETFKKHILNLAKGKGRISKTKKEYLLEERDINRFSVQKDFINRNLVDTRYATRGLMNLLRSYFRVNNLDVKVKSINGGFTSFLRRKWKFKKERNKGYKHHAEDALIIANADFIFKEWKKLDKAKKVMENQMFEEKQAESMPEIETEQEYKEIFITPHQIKHIKDFKDYKYSHRVDKKPNRELINDTLYSTRKDDKGNTLIVNNLNGLYDKDNDKLKKLINKSPEKLLMYHHDPQTYQKLKLIMEQYGDEKNPLYKYYEETGNYLTKYSKKDNGPVIKKIKYYGNKLNAHLDITDDYPNSRNKVVKLSLKPYRFDVYLDNGVYKFVTVKNLDVIKKENYYEVNSKCYEEAKKLKKISNQAEFIASFYNNDLIKINGELYRVIGVNNDLLNRIEVNMIDITYREYLENMNDKRPPRIIKTIASKTQSIKKYSTDILGNLYEVKSKKHPQIIKKG

SEQ ID NO: 498 - protein, 1368 aa, synthetic construct
MDKKYSIGLDIGTNSVGWAVITDEYKVPSKKFKVLGNTDRHSIKKNLIGALLFDSGETAEATRLKRTARRRYTRRKNRICYLQEIFSNEMAKVDDSFFHRLEESFLVEEDKKHERHPIFGNIVDEVAYHEKYPTIYHLRKKLVDSTDKADLRLIYLALAHMIKFRGHFLIEGDLNPDNSDVDKLFIQLVQTYNQLFEENPINASGVDAKAILSARLSKSRRLENLIAQLPGEKKNGLFGNLIALSLGLTPNFKSNFDLAEDAKLQLSKDTYDDDLDNLLAQIGDQYADLFLAAKNLSDAILLSDILRVNTEITKAPLSASMIKRYDEHHQDLTLLKALVRQQLPEKYKEIFFDQSKNGYAGYIDGGASQEEFYKFIKPILEKMDGTEELLVKLNREDLLRKQRTFDNGSIPHQIHLGELHAILRRQEDFYPFLKDNREKIEKILTFRIPYYVGPLARGNSRFAWMTRKSEETITPWNFEEVVDKGASAQSFIERMTNFDKNLPNEKVLPKHSLLYEYFTVYNELTKVKYVTEGMRKPAFLSGEQKKAIVDLLFKTNRKVTVKQLKEDYFKKIECFDSVEISGVEDRFNASLGTYHDLLKIIKDKDFLDNEENEDILEDIVLTLTLFEDREMIEERLKTYAHLFDDKVMKQLKRRRYTGWGRLSRKLINGIRDKQSGKTILDFLKSDGFANRNFMQLIHDDSLTFKEDIQKAQVSGQGDSLHEHIANLAGSPAIKKGILQTVKVVDELVKVMGRHKPENIVIEMARENQTTQKGQKNSRERMKRIEEGIKELGSQILKEHPVENTQLQNEKLYLYYLQNGRDMYVDQELDINRLSDYDVDAIVPQSFLKDDSIDNKVLTRSDKNRGKSDNVPSEEVVKKMKNYWRQLLNAKLITQRKFDNLTKAERGGLSELDKAGFIKRQLVETRQITKHVAQILDSRMNTKYDENDKLIREVKVITLKSKLVSDFRKDFQFYKVREINNYHHAHDAYLNAVVGTALIKKYPKLESEFVYGDYKVYDVRKMIAKSEQEIGKATAKYFFYSNIMNFFKTEITLANGEIRKRPLIETNGETGEIVWDKGRDFATVRKVLSMPQVNIVKKTEVQTGGFSKESIRPKRNSDKLIARKKDWDPKKYGGFVSPTVAYSVLVVAKVEKGKSKKLKSVKELLGITIMERSSFEKNPIDFLEAKGYKEVKKDLIIKLPKYSLFELENGRKRMLASARFLQKGNELALPSKYVNFLYLASHYEKLKGSPEDNEQKQLFVEQHKHYLDEIIEQISEFSKRVILADANLDKVLSAYNKHRDKPIREQAENIIHLFTLTNLGAPRAFKYFDTTIDRKVYRSTKEVLDATLIHQSITGLYETRIDLSQLGGD

SEQ ID NO: 499 - protein, 1368 aa, synthetic construct
MDKKYSIGLDIGTNSVGWAVITDEYKVPSKKFKVLGNTDRHSIKKNLIGALLFDSGETAEATRLKRTARRRYTRRKNRICYLQEIFSNEMAKVDDSFFHRLEESFLVEEDKKHERHPIFGNIVDEVAYHEKYPTIYHLRKKLVDSTDKADLRLIYLALAHMIKFRGHFLIEGDLNPDNSDVDKLFIQLVQTYNQLFEENPINASGVDAKAILSARLSKSRRLENLIAQLPGEKKNGLFGNLIALSLGLTPNFKSNFDLAEDAKLQLSKDTYDDDLDNLLAQIGDQYADLFLAAKNLSDAILLSDILRVNTEITKAPLSASMIKRYDEHHQDLTLLKALVRQQLPEKYKEIFFDQSKNGYAGYIDGGASQEEFYKFIKPILEKMDGTEELLVKLNREDLLRKQRTFDNGSIPHQIHLGELHAILRRQEDFYPFLKDNREKIEKILTFRIPYYVGPLARGNSRFAWMTRKSEETITPWNFEEVVDKGASAQSFIERMTNFDKNLPNEKVLPKHSLLYEYFTVYNELTKVKYVTEGMRKPAFLSGEQKKAIVDLLFKTNRKVTVKQLKEDYFKKIECFDSVEISGVEDRFNASLGTYHDLLKIIKDKDFLDNEENEDILEDIVLTLTLFEDREMIEERLKTYAHLFDDKVMKQLKRRRYTGWGRLSRKLINGIRDKQSGKTILDFLKSDGFANRNFMQLIHDDSLTFKEDIQKAQVSGQGDSLHEHIANLAGSPAIKKGILQTVKVVDELVKVMGRHKPENIVIEMARENQTTQKGQKNSRERMKRIEEGIKELGSQILKEHPVENTQLQNEKLYLYYLQNGRDMYVDQELDINRLSDYDVDAIVPQSFLKDDSIDNKVLTRSDKNRGKSDNVPSEEVVKKMKNYWRQLLNAKLITQRKFDNLTKAERGGLSELDKAGFIKRQLVETRQITKHVAQILDSRMNTKYDENDKLIREVKVITLKSKLVSDFRKDFQFYKVREINNYHHAHDAYLNAVVGTALIKKYPKLESEFVYGDYKVYDVRKMIAKSEQEIGKATAKYFFYSNIMNFFKTEITLANGEIRKRPLIETNGETGEIVWDKGRDFATVRKVLSMPQVNIVKKTEVQTGGFSKESILPKRNSDKLIARKKDWDPKKYGGFVSPTVAYSVLVVAKVEKGKSKKLKSVKELLGITIMERSSFEKNPIDFLEAKGYKEVKKDLIIKLPKYSLFELENGRKRMLASARELQKGNELALPSKYVNFLYLASHYEKLKGSPEDNEQKQLFVEQHKHYLDEIIEQISEFSKRVILADANLDKVLSAYNKHRDKPIREQAENIIHLFTLTNLGAPAAFKYFDTTIDRKQYRSTKEVLDATLIHQSITGLYETRIDLSQLGGD

SEQ ID NO: 500 - protein, 1368 aa, synthetic construct
MDKKYSIGLDIGTNSVGWAVITDEYKVPSKKFKVLGNTDRHSIKKNLIGALLFDSGETAERTRLKRTARRRYTRRKNRICYLQEIFSNEMAKVDDSFFHRLEESFLVEEDKKHERHPIFGNIVDEVAYHEKYPTIYHLRKKLVDSTDKADLRLIYLALAHMIKFRGHFLIEGDLNPDNSDVDKLFIQLVQTYNQLFEENPINASGVDAKAILSARLSKSRRLENLIAQLPGEKKNGLFGNLIALSLGLTPNFKSNFDLAEDAKLQLSKDTYDDDLDNLLAQIGDQYADLFLAAKNLSDAILLSDILRVNTEITKAPLSASMIKRYDEHHQDLTLLKALVRQQLPEKYKEIFFDQSKNGYAGYIDGGASQEEFYKFIKPILEKMDGTEELLVKLNREDLLRKQRTFDNGSIPHQIHLGELHAILRRQEDFYPFLKDNREKIEKILTFRIPYYVGPLARGNSRFAWMTRKSEETITPWNFEEVVDKGASAQSFIERMTNFDKNLPNEKVLPKHSLLYEYFTVYNELTKVKYVTEGMRKPAFLSGEQKKAIVDLLFKTNRKVTVKQLKEDYFKKIECFDSVEISGVEDRFNASLGTYHDLLKIIKDKDFLDNEENEDILEDIVLTLTLFEDREMIEERLKTYAHLFDDKVMKQLKRRRYTGWGRLSRKLINGIRDKQSGKTILDFLKSDGFANRNFMQLIHDDSLTFKEDIQKAQVSGQGDSLHEHIANLAGSPAIKKGILQTVKVVDELVKVMGRHKPENIVIEMARENQTTQKGQKNSRERMKRIEEGIKELGSQILKEHPVENTQLQNEKLYLYYLQNGRDMYVDQELDINRLSDYDVDAIVPQSFLKDDSIDNKVLTRSDKNRGKSDNVPSEEVVKKMKNYWRQLLNAKLITQRKFDNLTKAERGGLSELDKAGFIKRQLVETRQITKHVAQILDSRMNTKYDENDKLIREVKVITLKSKLVSDFRKDFQFYKVREINNYHHAHDAYLNAVVGTALIKKYPKLESEFVYGDYKVYDVRKMIAKSEQEIGKATAKYFFYSNIMNFFKTEITLANGEIRKRPLIETNGETGEIVWDKGRDFATVRKVLSMPQVNIVKKTEVQTGGFSKESIRPKRNSDKLIARKKDWDPKKYGGFLWPTVAYSVLVVAKVEKGKSKKLKSVKELLGITIMERSSFEKNPIDFLEAKGYKEVKKDLIIKLPKYSLFELENGRKRMLASAKQLQKGNELALPSKYVNFLYLASHYEKLKGSPEDNEQKQLFVEQHKHYLDEIIEQISEFSKRVILADANLDKVLSAYNKHRDKPIREQAENIIHLFTLTRLGAPRAFKYFDTTIDPKQYRSTKEVLDATLIHQSITGLYETRIDLSQLGGD

SEQ ID NO: 501 - protein, 1057 aa, synthetic construct
MNQKFILGLDIGITSVGYGLIDYETKNIIDAGVRLFPEANVENNEGRRSKRGSRRLKRRRIHRLERVKLLLTEYDLINKEQIPTSNNPYQIRVKGLSEILSKDELAIALLHLAKRRGIHNVDVAADKEETASDSLSTKDQINKNAKFLESRYVCELQKERLENEGHVRGVENRFLTKDIVREAKKIIDTQMQYYPEIDETFKEKYISLVETRREYFEGPGQGSPFGWNGDLKKWYEMLMGHCTYFPQELRSVKYAYSADLFNALNDLNNLIIQRDNSEKLEYHEKYHIIENVFKQKKKPTLKQIAKEIGVNPEDIKGYRITKSGTPEFTSFKLFHDLKKVVKDHAILDDIDLLNQIAEILTIYQDKDSIVAELGQLEYLMSEADKQSISELTGYTGTHSLSLKCMNMIIDELWHSSMNQMEVFTYLNMRPKKYELKGYQRIPTDMIDDAILSPVVKRTFIQSINVINKVIEKYGIPEDIIIELARENNSDDRKKFINNLQKKNEATRKRINEIIGQTGNQNAKRIVEKIRLHDQQEGKCLYSLESIPLEDLLNNPNHYEVDHIIPRSVSFDNSYHNKVLVKQSEASKKSNLTPYQYFNSGKSKLSYNQFKQHILNLSKSQDRISKKKKEYLLEERDINKFEVQKEFINRNLVDTRYATRELTNYLKAYFSANNMNVKVKTINGSFTDYLRKVWKFKKERNHGYKHHAEDALIIANADFLFKENKKLKAVNSVLEKPEIETKQLDIQVDSEDNYSEMFIIPKQVQDIKDFRNFKYSHRVDKKPNRQLINDTLYSTRKKDNSTYIVQTIKDIYAKDNTTLKKQFDKSPEKFLMYQHDPRTFEKLEVIMKQYANEKNPLAKYHEETGEYLTKYSKKNNGPIVKSLKYIGNKLGSHLDVTHQFKSSTKKLVKLSIKNYRFDVYLTEKGYKFVTIAYLNVFKKDNYYYIPKDKYQELKEKKKIKDTDQFIASFYKNDLIKLNGDLYKIIGVNSDDRNIIELDYYDIKYKDYCEINNIKGEPRIKKTIGKKTESIEKFTTDVLGNLYLHSTEKAPQLIFKRGL

SEQ ID NO: 502 - protein, 1057 aa, synthetic construct
MNQKFILGLDIGITSVGYGLIDYETKNIIDAGVRLFPEANVENNEGRRSKRGSRRLKRRRIHRLERVKLLLTEYDLINKEQIPTSNNPYQIRVKGLSEILSKDELAIALLHLAKRRGIHNVDVAADKEETASDSLSTKDQINKNAKFLESRYVCELQKERLENEGHVRGVENRFLTKDIVREAKKIIDTQMQYYPEIDETFKEKYISLVETRREYFEGPGQGSPFGWNGDLKKWYEMLMGHCTYFPQELRSVKYAYSADLFNALNDLNNLIIQRDNSEKLEYHEKYHIIENVFKQKKKPTLKQIAKEIGVNPEDIKGYRITKSGTPEFTSFKLFHDLKKVVKDHAILDDIDLLNQIAEILTIYQDKDSIVAELGQLEYLMSEADKQSISELTGYTGTHSLSLKCMNMIIDELWHSSMNQMEVFTYLNMRPKKYELKGYQRIPTDMIDDAILSPVVKRTFIQSINVINKVIEKYGIPEDIIIELARENNSDDRKKFINNLQKKNEATRKRINEIIGQTGNQNAKRIVEKIRLHDQQEGKCLYSLESIPLEDLLNNPNHYEVDHIIPRSVSFDNSYHNKVLVKQSEASKKSNLTPYQYFNSGKSKLSYNQFKQHILNLSKSQDRISKKKKEYLLEERDINKFEVQKEFINRNLVDTRYATRELTSYLKAYFSANNMDVKVKTINGSFTNHLRKVWRFDKYRNHGYKHHAEDALIIANADFLFKENKKLQNTNKILEKPTIENNTKKVTVEKEEDYNNVFETPKLVEDIKQYRDYKFSHRVDKKPNRQLINDTLYSTRMKDEHDYIVQTITDIYGKDNTNLKKQFNKNPEKFLMYQNDPKTFEKLSIIMKQYSDEKNPLAKYYEETGEYLTKYSKKNNGPIVKKIKLLGNKVGNHLDVTNKYENSTKKLVKLSIKNYRFDVYLTEKGYKFVTIAYLNVFKKDNYYYIPKDKYQELKEKKKIKDTDQFIASFYKNDLIKLNGDLYKIIGVNSDDRNIIELDYYDIKYKDYCEINNIKGEPRIKKTIGKKTESIEKFTTDVLGNLYLHSTEKAPQLIFKRGL

SEQ ID NO: 503 - protein, 1368 aa, synthetic construct
MDKKYSIGLDIGTNSVGWAVITDEYKVPSKKFKVLGNTDRHSIKKNLIGALLFDSGETAEATRLKRTARRRYTRRKNRICYLQEIFSNEMAKVDDSFFHRLEESFLVEEDKKHERHPIFGNIVDEVAYHEKYPTIYHLRKKLVDSTDKADLRLIYLALAHMIKFRGHFLIEGDLNPDNSDVDKLFIQLVQTYNQLFEENPINASGVDAKAILSARLSKSRRLENLIAQLPGEKKNGLFGNLIALSLGLTPNFKSNFDLAEDAKLQLSKDTYDDDLDNLLAQIGDQYADLFLAAKNLSDAILLSDILRVNTEITKAPLSASMIKRYDEHHQDLTLLKALVRQQLPEKYKEIFFDQSKNGYAGYIDGGASQEEFYKFIKPILEKMDGTEELLVKLNREDLLRKQRTFDNGSIPHQIHLGELHAILRRQEDFYPFLKDNREKIEKILTFRIPYYVGPLARGNSRFAWMTRKSEETITPWNFEEVVDKGASAQSFIERMTNFDKNLPNEKVLPKHSLLYEYFTVYNELTKVKYVTEGMRKPAFLSGEQKKAIVDLLFKTNRKVTVKQLKEDYFKKIECFDSVEISGVEDRFNASLGTYHDLLKIIKDKDFLDNEENEDILEDIVLTLTLFEDREMIEERLKTYAHLFDDKVMKQLKRRRYTGWGRLSRKLINGIRDKQSGKTILDFLKSDGFANRNFMQLIHDDSLTFKEDIQKAQVSGQGDSLHEHIANLAGSPAIKKGILQTVKVVDELVKVMGRHKPENIVIEMARENQTTQKGQKNSRERMKRIEEGIKELGSQILKEHPVENTQLQNEKLYLYYLQNGRDMYVDQELDINRLSDYDVDAIVPQSFLKDDSIDNKVLTRSDKNRGKSDNVPSEEVVKKMKNYWRQLLNAKLITQRKFDNLTKAERGGLSELDKAGFIKRQLVETRQITKHVAQILDSRMNTKYDENDKLIREVKVITLKSKLVSDFRKDFQFYKVREINNYHHAHDAYLNAVVGTALIKKYPKLESEFVYGDYKVYDVRKMIAKSEQEIGKATAKYFFYSNIMNFFKTEITLANGEIRKRPLIETNGETGEIVWDKGRDFATVRKVLSMPQVNIVKKTEVQTGGFSKESILPKRNSDKLIARKKDWDPKKYGGFLWPTVAYSVLVVAKVEKGKSKKLKSVKELLGITIMERSSFEKNPIDFLEAKGYKEVKKDLIIKLPKYSLFELENGRKRMLASAKQLQKGNELALPSKYVNFLYLASHYEKLKGSPEDNEQKQLFVEQHKHYLDEIIEQISEFSKRVILADANLDKVLSAYNKHRDKPIREQAENIIHLFTLTNLGAPAAFKYFDTTIDRKQYRSTKEVLDATLIHQSITGLYETRIDLSQLGGD

SEQ ID NO: 504 - protein, 2117 aa, synthetic construct
MKRTADGSEFESPKKKRKVDKKYSIGLDIGTNSVGWAVITDEYKVPSKKFKVLGNTDRHSIKKNLIGALLFDSGETAEATRLKRTARRRYTRRKNRICYLQEIFSNEMAKVDDSFFHRLEESFLVEEDKKHERHPIFGNIVDEVAYHEKYPTIYHLRKKLVDSTDKADLRLIYLALAHMIKFRGHFLIEGDLNPDNSDVDKLFIQLVQTYNQLFEENPINASGVDAKAILSARLSKSRRLENLIAQLPGEKKNGLFGNLIALSLGLTPNFKSNFDLAEDAKLQLSKDTYDDDLDNLLAQIGDQYADLFLAAKNLSDAILLSDILRVNTEITKAPLSASMIKRYDEHHQDLTLLKALVRQQLPEKYKEIFFDQSKNGYAGYIDGGASQEEFYKFIKPILEKMDGTEELLVKLNREDLLRKQRTFDNGSIPHQIHLGELHAILRRQEDFYPFLKDNREKIEKILTFRIPYYVGPLARGNSRFAWMTRKSEETITPWNFEEVVDKGASAQSFIERMTNFDKNLPNEKVLPKHSLLYEYFTVYNELTKVKYVTEGMRKPAFLSGEQKKAIVDLLFKTNRKVTVKQLKEDYFKKIECFDSVEISGVEDRFNASLGTYHDLLKIIKDKDFLDNEENEDILEDIVLTLTLFEDREMIEERLKTYAHLFDDKVMKQLKRRRYTGWGRLSRKLINGIRDKQSGKTILDFLKSDGFANRNFMQLIHDDSLTFKEDIQKAQVSGQGDSLHEHIANLAGSPAIKKGILQTVKVVDELVKVMGRHKPENIVIEMARENQTTQKGQKNSRERMKRIEEGIKELGSQILKEHPVENTQLQNEKLYLYYLQNGRDMYVDQELDINRLSDYDVDAIVPQSFLKDDSIDNKVLTRSDKNRGKSDNVPSEEVVKKMKNYWRQLLNAKLITQRKFDNLTKAERGGLSELDKAGFIKRQLVETRQITKHVAQILDSRMNTKYDENDKLIREVKVITLKSKLVSDFRKDFQFYKVREINNYHHAHDAYLNAVVGTALIKKYPKLESEFVYGDYKVYDVRKMIAKSEQEIGKATAKYFFYSNIMNFFKTEITLANGEIRKRPLIETNGETGEIVWDKGRDFATVRKVLSMPQVNIVKKTEVQTGGFSKESILPKRNSDKLIARKKDWDPKKYGGFDSPTVAYSVLVVAKVEKGKSKKLKSVKELLGITIMERSSFEKNPIDFLEAKGYKEVKKDLIIKLPKYSLFELENGRKRMLASAGELQKGNELALPSKYVNFLYLASHYEKLKGSPEDNEQKQLFVEQHKHYLDEIIEQISEFSKRVILADANLDKVLSAYNKHRDKPIREQAENIIHLFTLTNLGAPAAFKYFDTTIDRKRYTSTKEVLDATLIHQSITGLYETRIDLSQLGGDSGGSSGGSSGSETPGTSESATPESSGGSSGGSSTLNIEDEYRLHETSKEPDVSLGSTWLSDFPQAWAETGGMGLAVRQAPLIIPLKATSTPVSIKQYPMSQEARLGIKPHIQRLLDQGILVPCQSPWNTPLLPVKKPGTNDYRPVQDLREVNKRVEDIHPTVPNPYNLLSGLPPSHQWYTVLDLKDAFFCLRLHPTSQPLFAFEWRDPEMGISGQLTWTRLPQGFKNSPTLFNEALHRDLADFRIQHPDLILLQYVDDLLLAATSELDCQQGTRALLQTLGNLGYRASAKKAQICQKQVKYLGYLLKEGQRWLTEARKETVMGQPTPKTPRQLREFLGKAGFCRLFIPGFAEMAAPLYPLTKPGTLFNWGPDQQKAYQEIKQALLTAPALGLPDLTKPFELFVDEKQGYAKGVLTQKLGPWRRPVAYLSKKLDPVAAGWPPCLRMVAAIAVLTKDAGKLTMGQPLVILAPHAVEALVKQPPDRWLSNARMTHYQALLLDTDRVQFGPVVALNPATLLPLPEEGLQHNCLDILAEAHGTRPDLTDQPLPDADHTWYTDGSSLLQEGQRKAGAAVTTETEVIWAKALPAGTSAQRAELIALTQALKMAEGKKLNVYTDSRYAFATAHIHGEIYRRRGWLTSEGKEIKNKDEILALLKALFLPKRLSIIHCPGHQKGHSAEARGNRMADQAARKAAITETPDTSTLLIENSSPSGGSKRTADGSEFEPKKKRKV

SEQ ID NO: 505 - protein, 1803 aa, synthetic construct
MKRTADGSEFESPKKKRKVNQKFILGLDIGITSVGYGLIDYETKNIIDAGVRLFPEANVENNEGRRSKRGSRRLKRRRIHRLERVKKLLEDYNLLDQSQIPQSTNPYAIRVKGLSEALSKDELVIALLHIAKRRGIHKIDVIDSNDDVGNELSTKEQLNKNSKLLKDKFVCQIQLERMNEGQVRGEKNRFKTADIIKEIIQLLNVQKNFHQLDENFINKYIELVEMRREYFEGPGKGSPYGWEGDPKAWYETLMGHCTYFPDELRSVKYAYSADLFNALNDLNNLVIQRDGLSKLEYHEKYHIIENVFKQKKKPTLKQIANEINVNPEDIKGYRITKSGKPQFTEFKLYHDLKSVLFDQSILENEDVLDQIAEILTIYQDKDSIKSKLTELDILLNEEDKENIAQLTGYTGTHRLSLKCIRLVLEEQWYSSRNQMEIFTHLNIKPKKINLTAANKIPKAMIDEFILSPVVKRTFGQAINLINKIIEKYGVPEDIIIELARENNSKDKQKFINEMQKKNENTRKRINEIIGKYGNQNAKRLVEKIRLHDEQEGKCLYSLESIPLEDLLNNPNHYEVDHIIPRSVSFDNSYHNKVLVKQSEASKKSNLTPYQYFNSGKSKLSYNQFKQHILNLSKSQDRISKKKKEYLLEERDINKFEVQKEFINRNLVDTRYATRELTNYLKAYFSANNMNVKVKTINGSFTDYLRKVWKFKKERNHGYKHHAEDALIIANADFLFKENKKLKAVNSVLEKPEIESKQLDIQVDSEDNYSEMFIIPKQVQDIKDFRNFKYSHRVDKKPNRQLINDTLYSTRKKDNSTYIVQTIKDIYAKDNTTLKKQFDKSPEKFLMYQHDPRTFEKLEVIMKQYANEKNPLAKYHEETGEYLTKYSKKNNGPIVKSLKYIGNKLGSHLDVTHQFKSSTKKLVKLSIKPYRFDVYLTDKGYKFITISYLDVLKKDNYYYIPEQKYDKLKLGKAIDKNAKFIASFYKNDLIKLDGEIYKIIGVNSDTRNMIELDLPDIRYKEYCELNNIKGEPRIKKTIGKKVNSIEKLTTDVLGNVFTNTQYTKPQLLFKRGNSGGSSGGSSGSETPGTSESATPESSGGSSGGSSTLNIEDEYRLHETSKEPDVSLGSTWLSDFPQAWAETGGMGLAVRQAPLIIPLKATSTPVSIKQYPMSQEARLGIKPHIQRLLDQGILVPCQSPWNTPLLPVKKPGTNDYRPVQDLREVNKRVEDIHPTVPNPYNLLSGLPPSHQWYTVLDLKDAFFCLRLHPTSQPLFAFEWRDPEMGISGQLTWTRLPQGFKNSPTLFNEALHRDLADFRIQHPDLILLQYVDDLLLAATSELDCQQGTRALLQTLGNLGYRASAKKAQICQKQVKYLGYLLKEGQRWLTEARKETVMGQPTPKTPRQLREFLGKAGFCRLFIPGFAEMAAPLYPLTKPGTLFNWGPDQQKAYQEIKQALLTAPALGLPDLTKPFELFVDEKQGYAKGVLTQKLGPWRRPVAYLSKKLDPVAAGWPPCLRMVAAIAVLTKDAGKLTMGQPLVILAPHAVEALVKQPPDRWLSNARMTHYQALLLDTDRVQFGPVVALNPATLLPLPEEGLQHNCLDILAEAHGTRPDLTDQPLPDADHTWYTDGSSLLQEGQRKAGAAVTTETEVIWAKALPAGTSAQRAELIALTQALKMAEGKKLNVYTDSRYAFATAHIHGEIYRRRGWLTSEGKEIKNKDEILALLKALFLPKRLSIIHCPGHQKGHSAEARGNRMADQAARKAAITETPDTSTLLIENSSPSGGSKRTADGSEFEPKKKRKV

SEQ ID NO: 506 - protein, 1801 aa, synthetic construct
MKRTADGSEFESPKKKRKVKRNYILGLDIGITSVGYGIIDYETRDVIDAGVRLFKEANVENNEGRRSKRGARRLKRRRRHRIQRVKKLLFDYNLLTDHSELSGINPYEARVKGLSQKLSEEEFSAALLHLAKRRGVHNVNEVEEDTGNELSTKEQISRNSKALEEKYVAELQLERLKKDGEVRGSINRFKTSDYVKEAKQLLKVQKAYHQLDQSFIDTYIDLLETRRTYYEGPGEGSPFGWKDIKEWYEMLMGHCTYFPEELRSVKYAYNADLYNALNDLNNLVITRDENEKLEYYEKFQIIENVFKQKKKPTLKQIAKEILVNEEDIKGYRVTSTGKPEFTNLKVYHDIKDITARKEIIENAELLDQIAKILTIYQSSEDIQEELTNLNSELTQEEIEQISNLKGYTGTHNLSLKAINLILDELWHTNDNQIAIFNRLKLVPKKVDLSQQKEIPTTLVDDFILSPVVKRSFIQSIKVINAIIKKYGLPNDIIIELAREKNSKDAQKMINEMQKRNRQTNERIEEIIRTTGKENAKYLIEKIKLHDMQEGKCLYSLEAIPLEDLLNNPFNYEVDHIIPRSVSFDNSFNNKVLVKQEEASKKGNRTPFQYLSSSDSKISYETFKKHILNLAKGKGRISKTKKEYLLEERDINRFSVQKDFINRNLVDTRYATRGLMNLLRSYFRVNNLDVKVKSINGGFTSFLRRKWKFKKERNKGYKHHAEDALIIANADFIFKEWKKLDKAKKVMENQMFEEKQAESMPEIETEQEYKEIFITPHQIKHIKDFKDYKYSHRVDKKPNRELINDTLYSTRKDDKGNTLIVNNLNGLYDKDNDKLKKLINKSPEKLLMYHHDPQTYQKLKLIMEQYGDEKNPLYKYYEETGNYLTKYSKKDNGPVIKKIKYYGNKLNAHLDITDDYPNSRNKVVKLSLKPYRFDVYLDNGVYKFVTVKNLDVIKKENYYEVNSKCYEEAKKLKKISNQAEFIASFYNNDLIKINGELYRVIGVNNDLLNRIEVNMIDITYREYLENMNDKRPPRIIKTIASKTQSIKKYSTDILGNLYEVKSKKHPQIIKKSGGSSGGSSGSETPGTSESATPESSGGSSGGSSTLNIEDEYRLHETSKEPDVSLGSTWLSDFPQAWAETGGMGLAVRQAPLIIPLKATSTPVSIKQYPMSQEARLGIKPHIQRLLDQGILVPCQSPWNTPLLPVKKPGTNDYRPVQDLREVNKRVEDIHPTVPNPYNLLSGLPPSHQWYTVLDLKDAFFCLRLHPTSQPLFAFEWRDPEMGISGQLTWTRLPQGFKNSPTLFNEALHRDLADFRIQHPDLILLQYVDDLLLAATSELDCQQGTRALLQTLGNLGYRASAKKAQICQKQVKYLGYLLKEGQRWLTEARKETVMGQPTPKTPRQLREFLGKAGFCRLFIPGFAEMAAPLYPLTKPGTLFNWGPDQQKAYQEIKQALLTAPALGLPDLTKPFELFVDEKQGYAKGVLTQKLGPWRRPVAYLSKKLDPVAAGWPPCLRMVAAIAVLTKDAGKLTMGQPLVILAPHAVEALVKQPPDRWLSNARMTHYQALLLDTDRVQFGPVVALNPATLLPLPEEGLQHNCLDILAEAHGTRPDLTDQPLPDADHTWYTDGSSLLQEGQRKAGAAVTTETEVIWAKALPAGTSAQRAELIALTQALKMAEGKKLNVYTDSRYAFATAHIHGEIYRRRGWLTSEGKEIKNKDEILALLKALFLPKRLSIIHCPGHQKGHSAEARGNRMADQAARKAAITETPDTSTLLIENSSPSGGSKRTADGSEFEPKKKRKV

SEQ ID NO: 507 - protein, 2117 aa, synthetic construct
MKRTADGSEFESPKKKRKVDKKYSIGLDIGTNSVGWAVITDEYKVPSKKFKVLGNTDRHSIKKNLIGALLFDSGETAEATRLKRTARRRYTRRKNRICYLQEIFSNEMAKVDDSFFHRLEESFLVEEDKKHERHPIFGNIVDEVAYHEKYPTIYHLRKKLVDSTDKADLRLIYLALAHMIKFRGHFLIEGDLNPDNSDVDKLFIQLVQTYNQLFEENPINASGVDAKAILSARLSKSRRLENLIAQLPGEKKNGLFGNLIALSLGLTPNFKSNFDLAEDAKLQLSKDTYDDDLDNLLAQIGDQYADLFLAAKNLSDAILLSDILRVNTEITKAPLSASMIKRYDEHHQDLTLLKALVRQQLPEKYKEIFFDQSKNGYAGYIDGGASQEEFYKFIKPILEKMDGTEELLVKLNREDLLRKQRTFDNGSIPHQIHLGELHAILRRQEDFYPFLKDNREKIEKILTFRIPYYVGPLARGNSRFAWMTRKSEETITPWNFEEVVDKGASAQSFIERMTNFDKNLPNEKVLPKHSLLYEYFTVYNELTKVKYVTEGMRKPAFLSGEQKKAIVDLLFKTNRKVTVKQLKEDYFKKIECFDSVEISGVEDRFNASLGTYHDLLKIIKDKDFLDNEENEDILEDIVLTLTLFEDREMIEERLKTYAHLFDDKVMKQLKRRRYTGWGRLSRKLINGIRDKQSGKTILDFLKSDGFANRNFMQLIHDDSLTFKEDIQKAQVSGQGDSLHEHIANLAGSPAIKKGILQTVKVVDELVKVMGRHKPENIVIEMARENQTTQKGQKNSRERMKRIEEGIKELGSQILKEHPVENTQLQNEKLYLYYLQNGRDMYVDQELDINRLSDYDVDAIVPQSFLKDDSIDNKVLTRSDKNRGKSDNVPSEEVVKKMKNYWRQLLNAKLITQRKFDNLTKAERGGLSELDKAGFIKRQLVETRQITKHVAQILDSRMNTKYDENDKLIREVKVITLKSKLVSDFRKDFQFYKVREINNYHHAHDAYLNAVVGTALIKKYPKLESEFVYGDYKVYDVRKMIAKSEQEIGKATAKYFFYSNIMNFFKTEITLANGEIRKRPLIETNGETGEIVWDKGRDFATVRKVLSMPQVNIVKKTEVQTGGFSKESIRPKRNSDKLIARKKDWDPKKYGGFVSPTVAYSVLVVAKVEKGKSKKLKSVKELLGITIMERSSFEKNPIDFLEAKGYKEVKKDLIIKLPKYSLFELENGRKRMLASARFLQKGNELALPSKYVNFLYLASHYEKLKGSPEDNEQKQLFVEQHKHYLDEIIEQISEFSKRVILADANLDKVLSAYNKHRDKPIREQAENIIHLFTLTNLGAPRAFKYFDTTIDRKVYRSTKEVLDATLIHQSITGLYETRIDLSQLGGDSGGSSGGSSGSETPGTSESATPESSGGSSGGSSTLNIEDEYRLHETSKEPDVSLGSTWLSDFPQAWAETGGMGLAVRQAPLIIPLKATSTPVSIKQYPMSQEARLGIKPHIQRLLDQGILVPCQSPWNTPLLPVKKPGTNDYRPVQDLREVNKRVEDIHPTVPNPYNLLSGLPPSHQWYTVLDLKDAFFCLRLHPTSQPLFAFEWRDPEMGISGQLTWTRLPQGFKNSPTLFNEALHRDLADFRIQHPDLILLQYVDDLLLAATSELDCQQGTRALLQTLGNLGYRASAKKAQICQKQVKYLGYLLKEGQRWLTEARKETVMGQPTPKTPRQLREFLGKAGFCRLFIPGFAEMAAPLYPLTKPGTLFNWGPDQQKAYQEIKQALLTAPALGLPDLTKPFELFVDEKQGYAKGVLTQKLGPWRRPVAYLSKKLDPVAAGWPPCLRMVAAIAVLTKDAGKLTMGQPLVILAPHAVEALVKQPPDRWLSNARMTHYQALLLDTDRVQFGPVVALNPATLLPLPEEGLQHNCLDILAEAHGTRPDLTDQPLPDADHTWYTDGSSLLQEGQRKAGAAVTTETEVIWAKALPAGTSAQRAELIALTQALKMAEGKKLNVYTDSRYAFATAHIHGEIYRRRGWLTSEGKEIKNKDEILALLKALFLPKRLSIIHCPGHQKGHSAEARGNRMADQAARKAAITETPDTSTLLIENSSPSGGSKRTADGSEFEPKKKRKV

SEQ ID NO: 508 - protein, 1857 aa, synthetic construct
MKRTADGSEFESPKKKRKVATRSFILKIEPNEEVKKGLWKTHEVLNHGIAYYMNILKLIRQEAIYEHHEQDPKNPKKVSKAEIQAELWDFVLKMQKCNSFTHEVDKDEVFNILRELYEELVPSSVEKKGEANQLSNKFLYPLVDPNSQSGKGTASSGRKPRWYNLKIAGDPSWEEEKKKWEEDKKKDPLAKILGKLAEYGLIPLFIPYTDSNEPIVKEIKWMEKSRNQSVRRLDKDMFIQALERFLSWESWNLKVKEEYEKVEKEYKTLEERIKEDIQALKALEQYEKERQEQLLRDTLNTNEYRLSKRGLRGWREIIQKWLKMDENEPSEKYLEVFKDYQRKHPREAGDYSVYEFLSKKENHFIWRNHPEYPYLYATFCEIDKKKKDAKQQATFTLADPINHPLWVRFEERSGSNLNKYRILTEQLHTEKLKKKLTVQLDRLIYPTESGGWEEKGKVDIVLLPSRQFYNQIFLDIEEKGKHAFTYKDESIKFPLKGTLGGARVQFDRDHLRRYPHKVESGNVGRIYFNMTVNIEPTESPVSKSLKIHRDDFPKVVNFKPKELTEWIKDSKGKKLKSGIESLEIGLRVMSIDLGQRQAAAASIFEVVDQKPDIEGKLFFPIKGTELYAVHRASFNIKLPGETLVKSREVLRKAREDNLKLMNQKLNFLRNVLHFQQFEDITEREKRVTKWISRQENSDVPLVYQDELIQIRELMYKPYKDWVAFLKQLHKRLEVEIGKEVKHWRKSLSDGRKGLYGISLKNIDEIDRTRKFLLRWSLRPTEPGEVRRLEPGQRFAIDQLNHLNALKEDRLKKMANTIIMHALGYCYDVRKKKWQAKNPACQIILFEDLSNYNPYEERSRFENSKLMKWSRREIPRQVALQGEIYGLQVGEVGAQFSSRFHAKTGSPGIRCSVVTKEKLQDNRFFKNLQREGRLTLDKIAVLKEGDLYPDKGGEKFISLSKDRKCVTTHADINAAQNLQKRFWTRTHGFYKVYCKAYQVDGQTVYIPESKDQKQKIIEEFGEGYFILKDGVYEWVNAGKLKIKKGSSKQSSSELVDSDILKDSFDLASELKGEKLMLYRDPSGNVFPSDKWMAAGVFFGKLERILISKLTNQYSISTIEDDSSKQSMSGGSSGGSSGSETPGTSESATPESSGGSSGGSSTLNIEDEYRLHETSKEPDVSLGSTWLSDFPQAWAETGGMGLAVRQAPLIIPLKATSTPVSIKQYPMSQEARLGIKPHIQRLLDQGILVPCQSPWNTPLLPVKKPGTNDYRPVQDLREVNKRVEDIHPTVPNPYNLLSGLPPSHQWYTVLDLKDAFFCLRLHPTSQPLFAFEWRDPEMGISGQLTWTRLPQGFKNSPTLFNEALHRDLADFRIQHPDLILLQYVDDLLLAATSELDCQQGTRALLQTLGNLGYRASAKKAQICQKQVKYLGYLLKEGQRWLTEARKETVMGQPTPKTPRQLREFLGKAGFCRLFIPGFAEMAAPLYPLTKPGTLFNWGPDQQKAYQEIKQALLTAPALGLPDLTKPFELFVDEKQGYAKGVLTQKLGPWRRPVAYLSKKLDPVAAGWPPCLRMVAAIAVLTKDAGKLTMGQPLVILAPHAVEALVKQPPDRWLSNARMTHYQALLLDTDRVQFGPVVALNPATLLPLPEEGLQHNCLDILAEAHGTRPDLTDQPLPDADHTWYTDGSSLLQEGQRKAGAAVTTETEVIWAKALPAGTSAQRAELIALTQALKMAEGKKLNVYTDSRYAFATAHIHGEIYRRRGWLTSEGKEIKNKDEILALLKALFLPKRLSIIHCPGHQKGHSAEARGNRMADQAARKAAITETPDTSTLLIENSSPSGGSKRTADGSEFEPKKKRKV

SEQ ID NO: 509 - protein, 2117 aa, synthetic construct
MKRTADGSEFESPKKKRKVDKKYSIGLDIGTNSVGWAVITDEYKVPSKKFKVLGNTDRHSIKKNLIGALLFDSGETAEATRLKRTARRRYTRRKNRICYLQEIFSNEMAKVDDSFFHRLEESFLVEEDKKHERHPIFGNIVDEVAYHEKYPTIYHLRKKLVDSTDKADLRLIYLALAHMIKFRGHFLIEGDLNPDNSDVDKLFIQLVQTYNQLFEENPINASGVDAKAILSARLSKSRRLENLIAQLPGEKKNGLFGNLIALSLGLTPNFKSNFDLAEDAKLQLSKDTYDDDLDNLLAQIGDQYADLFLAAKNLSDAILLSDILRVNTEITKAPLSASMIKRYDEHHQDLTLLKALVRQQLPEKYKEIFFDQSKNGYAGYIDGGASQEEFYKFIKPILEKMDGTEELLVKLNREDLLRKQRTFDNGSIPHQIHLGELHAILRRQEDFYPFLKDNREKIEKILTFRIPYYVGPLARGNSRFAWMTRKSEETITPWNFEEVVDKGASAQSFIERMTNFDKNLPNEKVLPKHSLLYEYFTVYNELTKVKYVTEGMRKPAFLSGEQKKAIVDLLFKTNRKVTVKQLKEDYFKKIECFDSVEISGVEDRFNASLGTYHDLLKIIKDKDFLDNEENEDILEDIVLTLTLFEDREMIEERLKTYAHLFDDKVMKQLKRRRYTGWGRLSRKLINGIRDKQSGKTILDFLKSDGFANRNFMQLIHDDSLTFKEDIQKAQVSGQGDSLHEHIANLAGSPAIKKGILQTVKVVDELVKVMGRHKPENIVIEMARENQTTQKGQKNSRERMKRIEEGIKELGSQILKEHPVENTQLQNEKLYLYYLQNGRDMYVDQELDINRLSDYDVDAIVPQSFLKDDSIDNKVLTRSDKNRGKSDNVPSEEVVKKMKNYWRQLLNAKLITQRKFDNLTKAERGGLSELDKAGFIKRQLVETRQITKHVAQILDSRMNTKYDENDKLIREVKVITLKSKLVSDFRKDFQFYKVREINNYHHAHDAYLNAVVGTALIKKYPKLESEFVYGDYKVYDVRKMIAKSEQEIGKATAKYFFYSNIMNFFKTEITLANGEIRKRPLIETNGETGEIVWDKGRDFATVRKVLSMPQVNIVKKTEVQTGGFSKESILPKRNSDKLIARKKDWDPKKYGGFVSPTVAYSVLVVAKVEKGKSKKLKSVKELLGITIMERSSFEKNPIDFLEAKGYKEVKKDLIIKLPKYSLFELENGRKRMLASARELQKGNELALPSKYVNFLYLASHYEKLKGSPEDNEQKQLFVEQHKHYLDEIIEQISEFSKRVILADANLDKVLSAYNKHRDKPIREQAENIIHLFTLTNLGAPAAFKYFDTTIDRKQYRSTKEVLDATLIHQSITGLYETRIDLSQLGGDSGGSSGGSSGSETPGTSESATPESSGGSSGGSSTLNIEDEYRLHETSKEPDVSLGSTWLSDFPQAWAETGGMGLAVRQAPLIIPLKATSTPVSIKQYPMSQEARLGIKPHIQRLLDQGILVPCQSPWNTPLLPVKKPGTNDYRPVQDLREVNKRVEDIHPTVPNPYNLLSGLPPSHQWYTVLDLKDAFFCLRLHPTSQPLFAFEWRDPEMGISGQLTWTRLPQGFKNSPTLFNEALHRDLADFRIQHPDLILLQYVDDLLLAATSELDCQQGTRALLQTLGNLGYRASAKKAQICQKQVKYLGYLLKEGQRWLTEARKETVMGQPTPKTPRQLREFLGKAGFCRLFIPGFAEMAAPLYPLTKPGTLFNWGPDQQKAYQEIKQALLTAPALGLPDLTKPFELFVDEKQGYAKGVLTQKLGPWRRPVAYLSKKLDPVAAGWPPCLRMVAAIAVLTKDAGKLTMGQPLVILAPHAVEALVKQPPDRWLSNARMTHYQALLLDTDRVQFGPVVALNPATLLPLPEEGLQHNCLDILAEAHGTRPDLTDQPLPDADHTWYTDGSSLLQEGQRKAGAAVTTETEVIWAKALPAGTSAQRAELIALTQALKMAEGKKLNVYTDSRYAFATAHIHGEIYRRRGWLTSEGKEIKNKDEILALLKALFLPKRLSIIHCPGHQKGHSAEARGNRMADQAARKAAITETPDTSTLLIENSSPSGGSKRTADGSEFEPKKKRKV

SEQ ID NO: 510 - protein, 2117 aa, synthetic construct
MKRTADGSEFESPKKKRKVDKKYSIGLDIGTNSVGWAVITDEYKVPSKKFKVLGNTDRHSIKKNLIGALLFDSGETAERTRLKRTARRRYTRRKNRICYLQEIFSNEMAKVDDSFFHRLEESFLVEEDKKHERHPIFGNIVDEVAYHEKYPTIYHLRKKLVDSTDKADLRLIYLALAHMIKFRGHFLIEGDLNPDNSDVDKLFIQLVQTYNQLFEENPINASGVDAKAILSARLSKSRRLENLIAQLPGEKKNGLFGNLIALSLGLTPNFKSNFDLAEDAKLQLSKDTYDDDLDNLLAQIGDQYADLFLAAKNLSDAILLSDILRVNTEITKAPLSASMIKRYDEHHQDLTLLKALVRQQLPEKYKEIFFDQSKNGYAGYIDGGASQEEFYKFIKPILEKMDGTEELLVKLNREDLLRKQRTFDNGSIPHQIHLGELHAILRRQEDFYPFLKDNREKIEKILTFRIPYYVGPLARGNSRFAWMTRKSEETITPWNFEEVVDKGASAQSFIERMTNFDKNLPNEKVLPKHSLLYEYFTVYNELTKVKYVTEGMRKPAFLSGEQKKAIVDLLFKTNRKVTVKQLKEDYFKKIECFDSVEISGVEDRFNASLGTYHDLLKIIKDKDFLDNEENEDILEDIVLTLTLFEDREMIEERLKTYAHLFDDKVMKQLKRRRYTGWGRLSRKLINGIRDKQSGKTILDFLKSDGFANRNFMQLIHDDSLTFKEDIQKAQVSGQGDSLHEHIANLAGSPAIKKGILQTVKVVDELVKVMGRHKPENIVIEMARENQTTQKGQKNSRERMKRIEEGIKELGSQILKEHPVENTQLQNEKLYLYYLQNGRDMYVDQELDINRLSDYDVDAIVPQSFLKDDSIDNKVLTRSDKNRGKSDNVPSEEVVKKMKNYWRQLLNAKLITQRKFDNLTKAERGGLSELDKAGFIKRQLVETRQITKHVAQILDSRMNTKYDENDKLIREVKVITLKSKLVSDFRKDFQFYKVREINNYHHAHDAYLNAVVGTALIKKYPKLESEFVYGDYKVYDVRKMIAKSEQEIGKATAKYFFYSNIMNFFKTEITLANGEIRKRPLIETNGETGEIVWDKGRDFATVRKVLSMPQVNIVKKTEVQTGGFSKESIRPKRNSDKLIARKKDWDPKKYGGFLWPTVAYSVLVVAKVEKGKSKKLKSVKELLGITIMERSSFEKNPIDFLEAKGYKEVKKDLIIKLPKYSLFELENGRKRMLASAKQLQKGNELALPSKYVNFLYLASHYEKLKGSPEDNEQKQLFVEQHKHYLDEIIEQISEFSKRVILADANLDKVLSAYNKHRDKPIREQAENIIHLFTLTRLGAPRAFKYFDTTIDPKQYRSTKEVLDATLIHQSITGLYETRIDLSQLGGDSGGSSGGSSGSETPGTSESATPESSGGSSGGSSTLNIEDEYRLHETSKEPDVSLGSTWLSDFPQAWAETGGMGLAVRQAPLIIPLKATSTPVSIKQYPMSQEARLGIKPHIQRLLDQGILVPCQSPWNTPLLPVKKPGTNDYRPVQDLREVNKRVEDIHPTVPNPYNLLSGLPPSHQWYTVLDLKDAFFCLRLHPTSQPLFAFEWRDPEMGISGQLTWTRLPQGFKNSPTLFNEALHRDLADFRIQHPDLILLQYVDDLLLAATSELDCQQGTRALLQTLGNLGYRASAKKAQICQKQVKYLGYLLKEGQRWLTEARKETVMGQPTPKTPRQLREFLGKAGFCRLFIPGFAEMAAPLYPLTKPGTLFNWGPDQQKAYQEIKQALLTAPALGLPDLTKPFELFVDEKQGYAKGVLTQKLGPWRRPVAYLSKKLDPVAAGWPPCLRMVAAIAVLTKDAGKLTMGQPLVILAPHAVEALVKQPPDRWLSNARMTHYQALLLDTDRVQFGPVVALNPATLLPLPEEGLQHNCLDILAEAHGTRPDLTDQPLPDADHTWYTDGSSLLQEGQRKAGAAVTTETEVIWAKALPAGTSAQRAELIALTQALKMAEGKKLNVYTDSRYAFATAHIHGEIYRRRGWLTSEGKEIKNKDEILALLKALFLPKRLSIIHCPGHQKGHSAEARGNRMADQAARKAAITETPDTSTLLIENSSPSGGSKRTADGSEFEPKKKRKV

SEQ ID NO: 511 - protein, 1806 aa, synthetic construct
MKRTADGSEFESPKKKRKVNQKFILGLDIGITSVGYGLIDYETKNIIDAGVRLFPEANVENNEGRRSKRGSRRLKRRRIHRLERVKLLLTEYDLINKEQIPTSNNPYQIRVKGLSEILSKDELAIALLHLAKRRGIHNVDVAADKEETASDSLSTKDQINKNAKFLESRYVCELQKERLENEGHVRGVENRFLTKDIVREAKKIIDTQMQYYPEIDETFKEKYISLVETRREYFEGPGQGSPFGWNGDLKKWYEMLMGHCTYFPQELRSVKYAYSADLFNALNDLNNLIIQRDNSEKLEYHEKYHIIENVFKQKKKPTLKQIAKEIGVNPEDIKGYRITKSGTPEFTSFKLFHDLKKVVKDHAILDDIDLLNQIAEILTIYQDKDSIVAELGQLEYLMSEADKQSISELTGYTGTHSLSLKCMNMIIDELWHSSMNQMEVFTYLNMRPKKYELKGYQRIPTDMIDDAILSPVVKRTFIQSINVINKVIEKYGIPEDIIIELARENNSDDRKKFINNLQKKNEATRKRINEIIGQTGNQNAKRIVEKIRLHDQQEGKCLYSLESIPLEDLLNNPNHYEVDHIIPRSVSFDNSYHNKVLVKQSEASKKSNLTPYQYFNSGKSKLSYNQFKQHILNLSKSQDRISKKKKEYLLEERDINKFEVQKEFINRNLVDTRYATRELTNYLKAYFSANNMNVKVKTINGSFTDYLRKVWKFKKERNHGYKHHAEDALIIANADFLFKENKKLKAVNSVLEKPEIETKQLDIQVDSEDNYSEMFIIPKQVQDIKDFRNFKYSHRVDKKPNRQLINDTLYSTRKKDNSTYIVQTIKDIYAKDNTTLKKQFDKSPEKFLMYQHDPRTFEKLEVIMKQYANEKNPLAKYHEETGEYLTKYSKKNNGPIVKSLKYIGNKLGSHLDVTHQFKSSTKKLVKLSIKNYRFDVYLTEKGYKFVTIAYLNVFKKDNYYYIPKDKYQELKEKKKIKDTDQFIASFYKNDLIKLNGDLYKIIGVNSDDRNIIELDYYDIKYKDYCEINNIKGEPRIKKTIGKKTESIEKFTTDVLGNLYLHSTEKAPQLIFKRGLSGGSSGGSSGSETPGTSESATPESSGGSSGGSSTLNIEDEYRLHETSKEPDVSLGSTWLSDFPQAWAETGGMGLAVRQAPLIIPLKATSTPVSIKQYPMSQEARLGIKPHIQRLLDQGILVPCQSPWNTPLLPVKKPGTNDYRPVQDLREVNKRVEDIHPTVPNPYNLLSGLPPSHQWYTVLDLKDAFFCLRLHPTSQPLFAFEWRDPEMGISGQLTWTRLPQGFKNSPTLFNEALHRDLADFRIQHPDLILLQYVDDLLLAATSELDCQQGTRALLQTLGNLGYRASAKKAQICQKQVKYLGYLLKEGQRWLTEARKETVMGQPTPKTPRQLREFLGKAGFCRLFIPGFAEMAAPLYPLTKPGTLFNWGPDQQKAYQEIKQALLTAPALGLPDLTKPFELFVDEKQGYAKGVLTQKLGPWRRPVAYLSKKLDPVAAGWPPCLRMVAAIAVLTKDAGKLTMGQPLVILAPHAVEALVKQPPDRWLSNARMTHYQALLLDTDRVQFGPVVALNPATLLPLPEEGLQHNCLDILAEAHGTRPDLTDQPLPDADHTWYTDGSSLLQEGQRKAGAAVTTETEVIWAKALPAGTSAQRAELIALTQALKMAEGKKLNVYTDSRYAFATAHIHGEIYRRRGWLTSEGKEIKNKDEILALLKALFLPKRLSIIHCPGHQKGHSAEARGNRMADQAARKAAITETPDTSTLLIENSSPSGGSKRTADGSEFEPKKKRKV

SEQ ID NO: 512 - protein, 1806 aa, synthetic construct
MKRTADGSEFESPKKKRKVNQKFILGLDIGITSVGYGLIDYETKNIIDAGVRLFPEANVENNEGRRSKRGSRRLKRRRIHRLERVKLLLTEYDLINKEQIPTSNNPYQIRVKGLSEILSKDELAIALLHLAKRRGIHNVDVAADKEETASDSLSTKDQINKNAKFLESRYVCELQKERLENEGHVRGVENRFLTKDIVREAKKIIDTQMQYYPEIDETFKEKYISLVETRREYFEGPGQGSPFGWNGDLKKWYEMLMGHCTYFPQELRSVKYAYSADLFNALNDLNNLIIQRDNSEKLEYHEKYHIIENVFKQKKKPTLKQIAKEIGVNPEDIKGYRITKSGTPEFTSFKLFHDLKKVVKDHAILDDIDLLNQIAEILTIYQDKDSIVAELGQLEYLMSEADKQSISELTGYTGTHSLSLKCMNMIIDELWHSSMNQMEVFTYLNMRPKKYELKGYQRIPTDMIDDAILSPVVKRTFIQSINVINKVIEKYGIPEDIIIELARENNSDDRKKFINNLQKKNEATRKRINEIIGQTGNQNAKRIVEKIRLHDQQEGKCLYSLESIPLEDLLNNPNHYEVDHIIPRSVSFDNSYHNKVLVKQSEASKKSNLTPYQYFNSGKSKLSYNQFKQHILNLSKSQDRISKKKKEYLLEERDINKFEVQKEFINRNLVDTRYATRELTSYLKAYFSANNMDVKVKTINGSFTNHLRKVWRFDKYRNHGYKHHAEDALIIANADFLFKENKKLQNTNKILEKPTIENNTKKVTVEKEEDYNNVFETPKLVEDIKQYRDYKFSHRVDKKPNRQLINDTLYSTRMKDEHDYIVQTITDIYGKDNTNLKKQFNKNPEKFLMYQNDPKTFEKLSIIMKQYSDEKNPLAKYYEETGEYLTKYSKKNNGPIVKKIKLLGNKVGNHLDVTNKYENSTKKLVKLSIKNYRFDVYLTEKGYKFVTIAYLNVFKKDNYYYIPKDKYQELKEKKKIKDTDQFIASFYKNDLIKLNGDLYKIIGVNSDDRNIIELDYYDIKYKDYCEINNIKGEPRIKKTIGKKTESIEKFTTDVLGNLYLHSTEKAPQLIFKRGLSGGSSGGSSGSETPGTSESATPESSGGSSGGSSTLNIEDEYRLHETSKEPDVSLGSTWLSDFPQAWAETGGMGLAVRQAPLIIPLKATSTPVSIKQYPMSQEARLGIKPHIQRLLDQGILVPCQSPWNTPLLPVKKPGTNDYRPVQDLREVNKRVEDIHPTVPNPYNLLSGLPPSHQWYTVLDLKDAFFCLRLHPTSQPLFAFEWRDPEMGISGQLTWTRLPQGFKNSPTLFNEALHRDLADFRIQHPDLILLQYVDDLLLAATSELDCQQGTRALLQTLGNLGYRASAKKAQICQKQVKYLGYLLKEGQRWLTEARKETVMGQPTPKTPRQLREFLGKAGFCRLFIPGFAEMAAPLYPLTKPGTLFNWGPDQQKAYQEIKQALLTAPALGLPDLTKPFELFVDEKQGYAKGVLTQKLGPWRRPVAYLSKKLDPVAAGWPPCLRMVAAIAVLTKDAGKLTMGQPLVILAPHAVEALVKQPPDRWLSNARMTHYQALLLDTDRVQFGPVVALNPATLLPLPEEGLQHNCLDILAEAHGTRPDLTDQPLPDADHTWYTDGSSLLQEGQRKAGAAVTTETEVIWAKALPAGTSAQRAELIALTQALKMAEGKKLNVYTDSRYAFATAHIHGEIYRRRGWLTSEGKEIKNKDEILALLKALFLPKRLSIIHCPGHQKGHSAEARGNRMADQAARKAAITETPDTSTLLIENSSPSGGSKRTADGSEFEPKKKRKV

SEQ ID NO: 513 - protein, 2117 aa, synthetic construct
MKRTADGSEFESPKKKRKVDKKYSIGLDIGTNSVGWAVITDEYKVPSKKFKVLGNTDRHSIKKNLIGALLFDSGETAEATRLKRTARRRYTRRKNRICYLQEIFSNEMAKVDDSFFHRLEESFLVEEDKKHERHPIFGNIVDEVAYHEKYPTIYHLRKKLVDSTDKADLRLIYLALAHMIKFRGHFLIEGDLNPDNSDVDKLFIQLVQTYNQLFEENPINASGVDAKAILSARLSKSRRLENLIAQLPGEKKNGLFGNLIALSLGLTPNFKSNFDLAEDAKLQLSKDTYDDDLDNLLAQIGDQYADLFLAAKNLSDAILLSDILRVNTEITKAPLSASMIKRYDEHHQDLTLLKALVRQQLPEKYKEIFFDQSKNGYAGYIDGGASQEEFYKFIKPILEKMDGTEELLVKLNREDLLRKQRTFDNGSIPHQIHLGELHAILRRQEDFYPFLKDNREKIEKILTFRIPYYVGPLARGNSRFAWMTRKSEETITPWNFEEVVDKGASAQSFIERMTNFDKNLPNEKVLPKHSLLYEYFTVYNELTKVKYVTEGMRKPAFLSGEQKKAIVDLLFKTNRKVTVKQLKEDYFKKIECFDSVEISGVEDRFNASLGTYHDLLKIIKDKDFLDNEENEDILEDIVLTLTLFEDREMIEERLKTYAHLFDDKVMKQLKRRRYTGWGRLSRKLINGIRDKQSGKTILDFLKSDGFANRNFMQLIHDDSLTFKEDIQKAQVSGQGDSLHEHIANLAGSPAIKKGILQTVKVVDELVKVMGRHKPENIVIEMARENQTTQKGQKNSRERMKRIEEGIKELGSQILKEHPVENTQLQNEKLYLYYLQNGRDMYVDQELDINRLSDYDVDHIVPQSFLKDDSIDNKVLTRSDKNRGKSDNVPSEEVVKKMKNYWRQLLNAKLITQRKFDNLTKAERGGLSELDKAGFIKRQLVETRQITKHVAQILDSRMNTKYDENDKLIREVKVITLKSKLVSDFRKDFQFYKVREINNYHHAHDAYLNAVVGTALIKKYPKLESEFVYGDYKVYDVRKMIAKSEQEIGKATAKYFFYSNIMNFFKTEITLANGEIRKRPLIETNGETGEIVWDKGRDFATVRKVLSMPQVNIVKKTEVQTGGFSKESILPKRNSDKLIARKKDWDPKKYGGFLWPTVAYSVLVVAKVEKGKSKKLKSVKELLGITIMERSSFEKNPIDFLEAKGYKEVKKDLIIKLPKYSLFELENGRKRMLASAKQLQKGNELALPSKYVNFLYLASHYEKLKGSPEDNEQKQLFVEQHKHYLDEIIEQISEFSKRVILADANLDKVLSAYNKHRDKPIREQAENIIHLFTLTNLGAPAAFKYFDTTIDRKQYRSTKEVLDATLIHQSITGLYETRIDLSQLGGDSGGSSGGSSGSETPGTSESATPESSGGSSGGSSTLNIEDEYRLHETSKEPDVSLGSTWLSDFPQAWAETGGMGLAVRQAPLIIPLKATSTPVSIKQYPMSQEARLGIKPHIQRLLDQGILVPCQSPWNTPLLPVKKPGTNDYRPVQDLREVNKRVEDIHPTVPNPYNLLSGLPPSHQWYTVLDLKDAFFCLRLHPTSQPLFAFEWRDPEMGISGQLTWTRLPQGFKNSPTLFNEALHRDLADFRIQHPDLILLQYVDDLLLAATSELDCQQGTRALLQTLGNLGYRASAKKAQICQKQVKYLGYLLKEGQRWLTEARKETVMGQPTPKTPRQLREFLGKAGFCRLFIPGFAEMAAPLYPLTKPGTLFNWGPDQQKAYQEIKQALLTAPALGLPDLTKPFELFVDEKQGYAKGVLTQKLGPWRRPVAYLSKKLDPVAAGWPPCLRMVAAIAVLTKDAGKLTMGQPLVILAPHAVEALVKQPPDRWLSNARMTHYQALLLDTDRVQFGPVVALNPATLLPLPEEGLQHNCLDILAEAHGTRPDLTDQPLPDADHTWYTDGSSLLQEGQRKAGAAVTTETEVIWAKALPAGTSAQRAELIALTQALKMAEGKKLNVYTDSRYAFATAHIHGEIYRRRGWLTSEGKEIKNKDEILALLKALFLPKRLSIIHCPGHQKGHSAEARGNRMADQAARKAAITETPDTSTLLIENSSPSGGSKRTADGSEFEPKKKRKV

SEQ ID NO: 514 - protein, 2099 aa, synthetic construct
MDKKYSIGLDIGTNSVGWAVITDEYKVPSKKFKVLGNTDRHSIKKNLIGALLFDSGETAEATRLKRTARRRYTRRKNRICYLQEIFSNEMAKVDDSFFHRLEESFLVEEDKKHERHPIFGNIVDEVAYHEKYPTIYHLRKKLVDSTDKADLRLIYLALAHMIKFRGHFLIEGDLNPDNSDVDKLFIQLVQTYNQLFEENPINASGVDAKAILSARLSKSRRLENLIAQLPGEKKNGLFGNLIALSLGLTPNFKSNFDLAEDAKLQLSKDTYDDDLDNLLAQIGDQYADLFLAAKNLSDAILLSDILRVNTEITKAPLSASMIKRYDEHHQDLTLLKALVRQQLPEKYKEIFFDQSKNGYAGYIDGGASQEEFYKFIKPILEKMDGTEELLVKLNREDLLRKQRTFDNGSIPHQIHLGELHAILRRQEDFYPFLKDNREKIEKILTFRIPYYVGPLARGNSRFAWMTRKSEETITPWNFEEVVDKGASAQSFIERMTNFDKNLPNEKVLPKHSLLYEYFTVYNELTKVKYVTEGMRKPAFLSGEQKKAIVDLLFKTNRKVTVKQLKEDYFKKIECFDSVEISGVEDRFNASLGTYHDLLKIIKDKDFLDNEENEDILEDIVLTLTLFEDREMIEERLKTYAHLFDDKVMKQLKRRRYTGWGRLSRKLINGIRDKQSGKTILDFLKSDGFANRNFMQLIHDDSLTFKEDIQKAQVSGQGDSLHEHIANLAGSPAIKKGILQTVKVVDELVKVMGRHKPENIVIEMARENQTTQKGQKNSRERMKRIEEGIKELGSQILKEHPVENTQLQNEKLYLYYLQNGRDMYVDQELDINRLSDYDVDHIVPQSFLKDDSIDNKVLTRSDKNRGKSDNVPSEEVVKKMKNYWRQLLNAKLITQRKFDNLTKAERGGLSELDKAGFIKRQLVETRQITKHVAQILDSRMNTKYDENDKLIREVKVITLKSKLVSDFRKDFQFYKVREINNYHHAHDAYLNAVVGTALIKKYPKLESEFVYGDYKVYDVRKMIAKSEQEIGKATAKYFFYSNIMNFFKTEITLANGEIRKRPLIETNGETGEIVWDKGRDFATVRKVLSMPQVNIVKKTEVQTGGFSKESILPKRNSDKLIARKKDWDPKKYGGFVSPTVAYSVLVVAKVEKGKSKKLKSVKELLGITIMERSSFEKNPIDFLEAKGYKEVKKDLIIKLPKYSLFELENGRKRMLASARELQKGNELALPSKYVNFLYLASHYEKLKGSPEDNEQKQLFVEQHKHYLDEIIEQISEFSKRVILADANLDKVLSAYNKHRDKPIREQAENIIHLFTLTNLGAPAAFKYFDTTIDRKQYRSTKEVLDATLIHQSITGLYETRIDLSQLGGDSGGSSGGSSGSETPGTSESATPESSGGSSGGSSTLNIEDEYRLHETSKEPDVSLGSTWLSDFPQAWAETGGMGLAVRQAPLIIPLKATSTPVSIKQYPMSQEARLGIKPHIQRLLDQGILVPCQSPWNTPLLPVKKPGTNDYRPVQDLREVNKRVEDIHPTVPNPYNLLSGLPPSHQWYTVLDLKDAFFCLRLHPTSQPLFAFEWRDPEMGISGQLTWTRLPQGFKNSPTLFNEALHRDLADFRIQHPDLILLQYVDDLLLAATSELDCQQGTRALLQTLGNLGYRASAKKAQICQKQVKYLGYLLKEGQRWLTEARKETVMGQPTPKTPRQLREFLGKAGFCRLFIPGFAEMAAPLYPLTKPGTLFNWGPDQQKAYQEIKQALLTAPALGLPDLTKPFELFVDEKQGYAKGVLTQKLGPWRRPVAYLSKKLDPVAAGWPPCLRMVAAIAVLTKDAGKLTMGQPLVILAPHAVEALVKQPPDRWLSNARMTHYQALLLDTDRVQFGPVVALNPATLLPLPEEGLQHNCLDILAEAHGTRPDLTDQPLPDADHTWYTDGSSLLQEGQRKAGAAVTTETEVIWAKALPAGTSAQRAELIALTQALKMAEGKKLNVYTDSRYAFATAHIHGEIYRRRGWLTSEGKEIKNKDEILALLKALFLPKRLSIIHCPGHQKGHSAEARGNRMADQAARKAAITETPDTSTLLIENSSPSGGSKRTADGSEFEPKKKRKV

SEQ ID NO: 515 - protein, 2074 aa, synthetic construct
MSDKKYSIGLAIGTNSVGWAVITDEYKVPSKKFKVLGNTDRHSIKKNLIGALLFDSGETAEATRLKRTARRRYTRRKNRICYLQEIFSNEMAKVDDSFFHRLEESFLVEEDKKHERHPIFGNIVDEVAYHEKYPTIYHLRKKLVDSTDKADLRLIYLALAHMIKFRGHFLIEGDLNPDNSDVDKLFIQLVQTYNQLFEENPINASGVDAKAILSARLSKSRRLENLIAQLPGEKKNGLFGNLIALSLGLTPNFKSNFDLAEDAKLQLSKDTYDDDLDNLLAQIGDQYADLFLAAKNLSDAILLSDILRVNTEITKAPLSASMIKRYDEHHQDLTLLKALVRQQLPEKYKEIFFDQSKNGYAGYIDGGASQEEFYKFIKPILEKMDGTEELLVKLNREDLLRKQRTFDNGSIPHQIHLGELHAILRRQEDFYPFLKDNREKIEKILTFRIPYYVGPLARGNSRFAWMTRKSEETITPWNFEEVVDKGASAQSFIERMTNFDKNLPNEKVLPKHSLLYEYFTVYNELTKVKYVTEGMRKPAFLSGEQKKAIVDLLFKTNRKVTVKQLKEDYFKKIECFDSVEISGVEDRFNASLGTYHDLLKIIKDKDFLDNEENEDILEDIVLTLTLFEDREMIEERLKTYAHLFDDKVMKQLKRRRYTGWGRLSRKLINGIRDKQSGKTILDFLKSDGFANRNFMQLIHDDSLTFKEDIQKAQVSGQGDSLHEHIANLAGSPAIKKGILQTVKVVDELVKVMGRHKPENIVIEMARENQTTQKGQKNSRERMKRIEEGIKELGSQILKEHPVENTQLQNEKLYLYYLQNGRDMYVDQELDINRLSDYDVDHIVPQSFLKDDSIDNKVLTRSDKNRGKSDNVPSEEVVKKMKNYWRQLLNAKLITQRKFDNLTKAERGGLSELDKAGFIKRQLVETRQITKHVAQILDSRMNTKYDENDKLIREVKVITLKSKLVSDFRKDFQFYKVREINNYHHAHDAYLNAVVGTALIKKYPKLESEFVYGDYKVYDVRKMIAKSEQEIGKATAKYFFYSNIMNFFKTEITLANGEIRKRPLIETNGETGEIVWDKGRDFATVRKVLSMPQVNIVKKTEVQTGGFSKESIRPKRNSDKLIARKKDWDPKKYGGFVSPTVAYSVLVVAKVEKGKSKKLKSVKELLGITIMERSSFEKNPIDFLEAKGYKEVKKDLIIKLPKYSLFELENGRKRMLASARFLQKGNELALPSKYVNFLYLASHYEKLKGSPEDNEQKQLFVEQHKHYLDEIIEQISEFSKRVILADANLDKVLSAYNKHRDKPIREQAENIIHLFTLTNLGAPRAFKYFDTTIDRKVYRSTKEVLDATLIHQSITGLYETRIDLSQLGGDLGGSGGSGGSGGSGGSGGSGGSGGSGGSTLNIEDEYRLHETSKEPDVSLGSTWLSDFPQAWAETGGMGLAVRQAPLIIPLKATSTPVSIKQYPMSQEARLGIKPHIQRLLDQGILVPCQSPWNTPLLPVKKPGTNDYRPVQDLREVNKRVEDIHPTVPNPYNLLSGLPPSHQWYTVLDLKDAFFCLRLHPTSQPLFAFEWRDPEMGISGQLTWTRLPQGFKNSPTLFNEALHRDLADFRIQHPDLILLQYVDDLLLAATSELDCQQGTRALLQTLGNLGYRASAKKAQICQKQVKYLGYLLKEGQRWLTEARKETVMGQPTPKTPRQLREFLGKAGFCRLFIPGFAEMAAPLYPLTKPGTLFNWGPDQQKAYQEIKQALLTAPALGLPDLTKPFELFVDEKQGYAKGVLTQKLGPWRRPVAYLSKKLDPVAAGWPPCLRMVAAIAVLTKDAGKLTMGQPLVILAPHAVEALVKQPPDRWLSNARMTHYQALLLDTDRVQFGPVVALNPATLLPLPEEGLQHNCLDILAEAHGTRPDLTDQPLPDADHTWYTDGSSLLQEGQRKAGAAVTTETEVIWAKALPAGTSAQRAELIALTQALKMAEGKKLNVYTDSRYAFATAHIHGEIYRRRGWLTSEGKEIKNKDEILALLKALFLPKRLSIIHCPGHQKGHSAEARGNRMADQAARKAAITETPDTSTLLIENSSP

SEQ ID NO: 516 - protein, 2099 aa, synthetic construct
MDKKYSIGLDIGTNSVGWAVITDEYKVPSKKFKVLGNTDRHSIKKNLIGALLFDSGETAEATRLKRTARRRYTRRKNRICYLQEIFSNEMAKVDDSFFHRLEESFLVEEDKKHERHPIFGNIVDEVAYHEKYPTIYHLRKKLVDSTDKADLRLIYLALAHMIKFRGHFLIEGDLNPDNSDVDKLFIQLVQTYNQLFEENPINASGVDAKAILSARLSKSRRLENLIAQLPGEKKNGLFGNLIALSLGLTPNFKSNFDLAEDAKLQLSKDTYDDDLDNLLAQIGDQYADLFLAAKNLSDAILLSDILRVNTEITKAPLSASMIKRYDEHHQDLTLLKALVRQQLPEKYKEIFFDQSKNGYAGYIDGGASQEEFYKFIKPILEKMDGTEELLVKLNREDLLRKQRTFDNGSIPHQIHLGELHAILRRQEDFYPFLKDNREKIEKILTFRIPYYVGPLARGNSRFAWMTRKSEETITPWNFEEVVDKGASAQSFIERMTNFDKNLPNEKVLPKHSLLYEYFTVYNELTKVKYVTEGMRKPAFLSGEQKKAIVDLLFKTNRKVTVKQLKEDYFKKIECFDSVEISGVEDRFNASLGTYHDLLKIIKDKDFLDNEENEDILEDIVLTLTLFEDREMIEERLKTYAHLFDDKVMKQLKRRRYTGWGRLSRKLINGIRDKQSGKTILDFLKSDGFANRNFMQLIHDDSLTFKEDIQKAQVSGQGDSLHEHIANLAGSPAIKKGILQTVKVVDELVKVMGRHKPENIVIEMARENQTTQKGQKNSRERMKRIEEGIKELGSQILKEHPVENTQLQNEKLYLYYLQNGRDMYVDQELDINRLSDYDVDHIVPQSFLKDDSIDNKVLTRSDKNRGKSDNVPSEEVVKKMKNYWRQLLNAKLITQRKFDNLTKAERGGLSELDKAGFIKRQLVETRQITKHVAQILDSRMNTKYDENDKLIREVKVITLKSKLVSDFRKDFQFYKVREINNYHHAHDAYLNAVVGTALIKKYPKLESEFVYGDYKVYDVRKMIAKSEQEIGKATAKYFFYSNIMNFFKTEITLANGEIRKRPLIETNGETGEIVWDKGRDFATVRKVLSMPQVNIVKKTEVQTGGFSKESILPKRNSDKLIARKKDWDPKKYGGFLWPTVAYSVLVVAKVEKGKSKKLKSVKELLGITIMERSSFEKNPIDFLEAKGYKEVKKDLIIKLPKYSLFELENGRKRMLASAKQLQKGNELALPSKYVNFLYLASHYEKLKGSPEDNEQKQLFVEQHKHYLDEIIEQISEFSKRVILADANLDKVLSAYNKHRDKPIREQAENIIHLFTLTNLGAPAAFKYFDTTIDRKQYRSTKEVLDATLIHQSITGLYETRIDLSQLGGDSGGSSGGSSGSETPGTSESATPESSGGSSGGSSTLNIEDEYRLHETSKEPDVSLGSTWLSDFPQAWAETGGMGLAVRQAPLIIPLKATSTPVSIKQYPMSQEARLGIKPHIQRLLDQGILVPCQSPWNTPLLPVKKPGTNDYRPVQDLREVNKRVEDIHPTVPNPYNLLSGLPPSHQWYTVLDLKDAFFCLRLHPTSQPLFAFEWRDPEMGISGQLTWTRLPQGFKNSPTLFNEALHRDLADFRIQHPDLILLQYVDDLLLAATSELDCQQGTRALLQTLGNLGYRASAKKAQICQKQVKYLGYLLKEGQRWLTEARKETVMGQPTPKTPRQLREFLGKAGFCRLFIPGFAEMAAPLYPLTKPGTLFNWGPDQQKAYQEIKQALLTAPALGLPDLTKPFELFVDEKQGYAKGVLTQKLGPWRRPVAYLSKKLDPVAAGWPPCLRMVAAIAVLTKDAGKLTMGQPLVILAPHAVEALVKQPPDRWLSNARMTHYQALLLDTDRVQFGPVVALNPATLLPLPEEGLQHNCLDILAEAHGTRPDLTDQPLPDADHTWYTDGSSLLQEGQRKAGAAVTTETEVIWAKALPAGTSAQRAELIALTQALKMAEGKKLNVYTDSRYAFATAHIHGEIYRRRGWLTSEGKEIKNKDEILALLKALFLPKRLSIIHCPGHQKGHSAEARGNRMADQAARKAAITETPDTSTLLIENSSPSGGSKRTADGSEFEPKKKRKV

SEQ ID NO: 517 - protein, 2099 aa, synthetic construct
MDKKYSIGLDIGTNSVGWAVITDEYKVPSKKFKVLGNTDRHSIKKNLIGALLFDSGETAERTRLKRTARRRYTRRKNRICYLQEIFSNEMAKVDDSFFHRLEESFLVEEDKKHERHPIFGNIVDEVAYHEKYPTIYHLRKKLVDSTDKADLRLIYLALAHMIKFRGHFLIEGDLNPDNSDVDKLFIQLVQTYNQLFEENPINASGVDAKAILSARLSKSRRLENLIAQLPGEKKNGLFGNLIALSLGLTPNFKSNFDLAEDAKLQLSKDTYDDDLDNLLAQIGDQYADLFLAAKNLSDAILLSDILRVNTEITKAPLSASMIKRYDEHHQDLTLLKALVRQQLPEKYKEIFFDQSKNGYAGYIDGGASQEEFYKFIKPILEKMDGTEELLVKLNREDLLRKQRTFDNGSIPHQIHLGELHAILRRQEDFYPFLKDNREKIEKILTFRIPYYVGPLARGNSRFAWMTRKSEETITPWNFEEVVDKGASAQSFIERMTNFDKNLPNEKVLPKHSLLYEYFTVYNELTKVKYVTEGMRKPAFLSGEQKKAIVDLLFKTNRKVTVKQLKEDYFKKIECFDSVEISGVEDRFNASLGTYHDLLKIIKDKDFLDNEENEDILEDIVLTLTLFEDREMIEERLKTYAHLFDDKVMKQLKRRRYTGWGRLSRKLINGIRDKQSGKTILDFLKSDGFANRNFMQLIHDDSLTFKEDIQKAQVSGQGDSLHEHIANLAGSPAIKKGILQTVKVVDELVKVMGRHKPENIVIEMARENQTTQKGQKNSRERMKRIEEGIKELGSQILKEHPVENTQLQNEKLYLYYLQNGRDMYVDQELDINRLSDYDVDHIVPQSFLKDDSIDNKVLTRSDKNRGKSDNVPSEEVVKKMKNYWRQLLNAKLITQRKFDNLTKAERGGLSELDKAGFIKRQLVETRQITKHVAQILDSRMNTKYDENDKLIREVKVITLKSKLVSDFRKDFQFYKVREINNYHHAHDAYLNAVVGTALIKKYPKLESEFVYGDYKVYDVRKMIAKSEQEIGKATAKYFFYSNIMNFFKTEITLANGEIRKRPLIETNGETGEIVWDKGRDFATVRKVLSMPQVNIVKKTEVQTGGFSKESIRPKRNSDKLIARKKDWDPKKYGGFLWPTVAYSVLVVAKVEKGKSKKLKSVKELLGITIMERSSFEKNPIDFLEAKGYKEVKKDLIIKLPKYSLFELENGRKRMLASAKQLQKGNELALPSKYVNFLYLASHYEKLKGSPEDNEQKQLFVEQHKHYLDEIIEQISEFSKRVILADANLDKVLSAYNKHRDKPIREQAENIIHLFTLTRLGAPRAFKYFDTTIDPKQYRSTKEVLDATLIHQSITGLYETRIDLSQLGGDSGGSSGGSSGSETPGTSESATPESSGGSSGGSSTLNIEDEYRLHETSKEPDVSLGSTWLSDFPQAWAETGGMGLAVRQAPLIIPLKATSTPVSIKQYPMSQEARLGIKPHIQRLLDQGILVPCQSPWNTPLLPVKKPGTNDYRPVQDLREVNKRVEDIHPTVPNPYNLLSGLPPSHQWYTVLDLKDAFFCLRLHPTSQPLFAFEWRDPEMGISGQLTWTRLPQGFKNSPTLFNEALHRDLADFRIQHPDLILLQYVDDLLLAATSELDCQQGTRALLQTLGNLGYRASAKKAQICQKQVKYLGYLLKEGQRWLTEARKETVMGQPTPKTPRQLREFLGKAGFCRLFIPGFAEMAAPLYPLTKPGTLFNWGPDQQKAYQEIKQALLTAPALGLPDLTKPFELFVDEKQGYAKGVLTQKLGPWRRPVAYLSKKLDPVAAGWPPCLRMVAAIAVLTKDAGKLTMGQPLVILAPHAVEALVKQPPDRWLSNARMTHYQALLLDTDRVQFGPVVALNPATLLPLPEEGLQHNCLDILAEAHGTRPDLTDQPLPDADHTWYTDGSSLLQEGQRKAGAAVTTETEVIWAKALPAGTSAQRAELIALTQALKMAEGKKLNVYTDSRYAFATAHIHGEIYRRRGWLTSEGKEIKNKDEILALLKALFLPKRLSIIHCPGHQKGHSAEARGNRMADQAARKAAITETPDTSTLLIENSSPSGGSKRTADGSEFEPKKKRKV

SEQ ID NO: 518 - protein, 1800 aa, synthetic construct
MAPKKKRKVGIHGVPAAKRNYILGLDIGITSVGYGIIDYETRDVIDAGVRLFKEANVENNEGRRSKRGARRLKRRRRHRIQRVKKLLFDYNLLTDHSELSGINPYEARVKGLSQKLSEEEFSAALLHLAKRRGVHNVNEVEEDTGNELSTKEQISRNSKALEEKYVAELQLERLKKDGEVRGSINRFKTSDYVKEAKQLLKVQKAYHQLDQSFIDTYIDLLETRRTYYEGPGEGSPFGWKDIKEWYEMLMGHCTYFPEELRSVKYAYNADLYNALNDLNNLVITRDENEKLEYYEKFQIIENVFKQKKKPTLKQIAKEILVNEEDIKGYRVTSTGKPEFTNLKVYHDIKDITARKEIIENAELLDQIAKILTIYQSSEDIQEELTNLNSELTQEEIEQISNLKGYTGTHNLSLKAINLILDELWHTNDNQIAIFNRLKLVPKKVDLSQQKEIPTTLVDDFILSPVVKRSFIQSIKVINAIIKKYGLPNDIIIELAREKNSKDAQKMINEMQKRNRQTNERIEEIIRTTGKENAKYLIEKIKLHDMQEGKCLYSLEAIPLEDLLNNPFNYEVDHIIPRSVSFDNSFNNKVLVKQEENSKKGNRTPFQYLSSSDSKISYETFKKHILNLAKGKGRISKTKKEYLLEERDINRFSVQKDFINRNLVDTRYATRGLMNLLRSYFRVNNLDVKVKSINGGFTSFLRRKWKFKKERNKGYKHHAEDALIIANADFIFKEWKKLDKAKKVMENQMFEEKQAESMPEIETEQEYKEIFITPHQIKHIKDFKDYKYSHRVDKKPNRELINDTLYSTRKDDKGNTLIVNNLNGLYDKDNDKLKKLINKSPEKLLMYHHDPQTYQKLKLIMEQYGDEKNPLYKYYEETGNYLTKYSKKDNGPVIKKIKYYGNKLNAHLDITDDYPNSRNKVVKLSLKPYRFDVYLDNGVYKFVTVKNLDVIKKENYYEVNSKCYEEAKKLKKISNQAEFIASFYNNDLIKINGELYRVIGVNNDLLNRIEVNMIDITYREYLENMNDKRPPRIIKTIASKTQSIKKYSTDILGNLYEVKSKKHPQIIKKGSGGSSGGSSGSETPGTSESATPESSGGSSGGSSTLNIEDEYRLHETSKEPDVSLGSTWLSDFPQAWAETGGMGLAVRQAPLIIPLKATSTPVSIKQYPMSQEARLGIKPHIQRLLDQGILVPCQSPWNTPLLPVKKPGTNDYRPVQDLREVNKRVEDIHPTVPNPYNLLSGLPPSHQWYTVLDLKDAFFCLRLHPTSQPLFAFEWRDPEMGISGQLTWTRLPQGFKNSPTLFNEALHRDLADFRIQHPDLILLQYVDDLLLAATSELDCQQGTRALLQTLGNLGYRASAKKAQICQKQVKYLGYLLKEGQRWLTEARKETVMGQPTPKTPRQLREFLGKAGFCRLFIPGFAEMAAPLYPLTKPGTLFNWGPDQQKAYQEIKQALLTAPALGLPDLTKPFELFVDEKQGYAKGVLTQKLGPWRRPVAYLSKKLDPVAAGWPPCLRMVAAIAVLTKDAGKLTMGQPLVILAPHAVEALVKQPPDRWLSNARMTHYQALLLDTDRVQFGPVVALNPATLLPLPEEGLQHNCLDILAEAHGTRPDLTDQPLPDADHTWYTDGSSLLQEGQRKAGAAVTTETEVIWAKALPAGTSAQRAELIALTQALKMAEGKKLNVYTDSRYAFATAHIHGEIYRRRGWLTSEGKEIKNKDEILALLKALFLPKRLSIIHCPGHQKGHSAEARGNRMADQAARKAAITETPDTSTLLIENSSPSGGSKRTADGSEFEPKKKRKV

SEQ ID NO: 519 - protein, 1785 aa, synthetic construct
MNQKFILGLDIGITSVGYGLIDYETKNIIDAGVRLFPEANVENNEGRRSKRGSRRLKRRRIHRLERVKKLLEDYNLLDQSQIPQSTNPYAIRVKGLSEALSKDELVIALLHIAKRRGIHKIDVIDSNDDVGNELSTKEQLNKNSKLLKDKFVCQIQLERMNEGQVRGEKNRFKTADIIKEIIQLLNVQKNFHQLDENFINKYIELVEMRREYFEGPGKGSPYGWEGDPKAWYETLMGHCTYFPDELRSVKYAYSADLFNALNDLNNLVIQRDGLSKLEYHEKYHIIENVFKQKKKPTLKQIANEINVNPEDIKGYRITKSGKPQFTEFKLYHDLKSVLFDQSILENEDVLDQIAEILTIYQDKDSIKSKLTELDILLNEEDKENIAQLTGYTGTHRLSLKCIRLVLEEQWYSSRNQMEIFTHLNIKPKKINLTAANKIPKAMIDEFILSPVVKRTFGQAINLINKIIEKYGVPEDIIIELARENNSKDKQKFINEMQKKNENTRKRINEIIGKYGNQNAKRLVEKIRLHDEQEGKCLYSLESIPLEDLLNNPNHYEVDHIIPRSVSFDNSYHNKVLVKQSENSKKSNLTPYQYFNSGKSKLSYNQFKQHILNLSKSQDRISKKKKEYLLEERDINKFEVQKEFINRNLVDTRYATRELTNYLKAYFSANNMNVKVKTINGSFTDYLRKVWKFKKERNHGYKHHAEDALIIANADFLFKENKKLKAVNSVLEKPEIESKQLDIQVDSEDNYSEMFIIPKQVQDIKDFRNFKYSHRVDKKPNRQLINDTLYSTRKKDNSTYIVQTIKDIYAKDNTTLKKQFDKSPEKFLMYQHDPRTFEKLEVIMKQYANEKNPLAKYHEETGEYLTKYSKKNNGPIVKSLKYIGNKLGSHLDVTHQFKSSTKKLVKLSIKPYRFDVYLTDKGYKFITISYLDVLKKDNYYYIPEQKYDKLKLGKAIDKNAKFIASFYKNDLIKLDGEIYKIIGVNSDTRNMIELDLPDIRYKEYCELNNIKGEPRIKKTIGKKVNSIEKLTTDVLGNVFTNTQYTKPQLLFKRGNSGGSSGGSSGSETPGTSESATPESSGGSSGGSSTLNIEDEYRLHETSKEPDVSLGSTWLSDFPQAWAETGGMGLAVRQAPLIIPLKATSTPVSIKQYPMSQEARLGIKPHIQRLLDQGILVPCQSPWNTPLLPVKKPGTNDYRPVQDLREVNKRVEDIHPTVPNPYNLLSGLPPSHQWYTVLDLKDAFFCLRLHPTSQPLFAFEWRDPEMGISGQLTWTRLPQGFKNSPTLFNEALHRDLADFRIQHPDLILLQYVDDLLLAATSELDCQQGTRALLQTLGNLGYRASAKKAQICQKQVKYLGYLLKEGQRWLTEARKETVMGQPTPKTPRQLREFLGKAGFCRLFIPGFAEMAAPLYPLTKPGTLFNWGPDQQKAYQEIKQALLTAPALGLPDLTKPFELFVDEKQGYAKGVLTQKLGPWRRPVAYLSKKLDPVAAGWPPCLRMVAAIAVLTKDAGKLTMGQPLVILAPHAVEALVKQPPDRWLSNARMTHYQALLLDTDRVQFGPVVALNPATLLPLPEEGLQHNCLDILAEAHGTRPDLTDQPLPDADHTWYTDGSSLLQEGQRKAGAAVTTETEVIWAKALPAGTSAQRAELIALTQALKMAEGKKLNVYTDSRYAFATAHIHGEIYRRRGWLTSEGKEIKNKDEILALLKALFLPKRLSIIHCPGHQKGHSAEARGNRMADQAARKAAITETPDTSTLLIENSSPSGGSKRTADGSEFEPKKKRKV

SEQ ID NO: 520 - protein, 1761 aa, synthetic construct
MNQKFILGLDIGITSVGYGLIDYETKNIIDAGVRLFPEANVENNEGRRSKRGSRRLKRRRIHRLERVKLLLTEYDLINKEQIPTSNNPYQIRVKGLSEILSKDELAIALLHLAKRRGIHNVDVAADKEETASDSLSTKDQINKNAKFLESRYVCELQKERLENEGHVRGVENRFLTKDIVREAKKIIDTQMQYYPEIDETFKEKYISLVETRREYFEGPGQGSPFGWNGDLKKWYEMLMGHCTYFPQELRSVKYAYSADLFNALNDLNNLIIQRDNSEKLEYHEKYHIIENVFKQKKKPTLKQIAKEIGVNPEDIKGYRITKSGTPEFTSFKLFHDLKKVVKDHAILDDIDLLNQIAEILTIYQDKDSIVAELGQLEYLMSEADKQSISELTGYTGTHSLSLKCMNMIIDELWHSSMNQMEVFTYLNMRPKKYELKGYQRIPTDMIDDAILSPVVKRTFIQSINVINKVIEKYGIPEDIIIELARENNSDDRKKFINNLQKKNEATRKRINEIIGQTGNQNAKRIVEKIRLHDQQEGKCLYSLESIPLEDLLNNPNHYEVDHIIPRSVSFDNSYHNKVLVKQSENSKKSNLTPYQYFNSGKSKLSYNQFKQHILNLSKSQDRISKKKKEYLLEERDINKFEVQKEFINRNLVDTRYATRELTNYLKAYFSANNMNVKVKTINGSFTDYLRKVWKFKKERNHGYKHHAEDALIIANADFLFKENKKLKAVNSVLEKPEIETKQLDIQVDSEDNYSEMFIIPKQVQDIKDFRNFKYSHRVDKKPNRQLINDTLYSTRKKDNSTYIVQTIKDIYAKDNTTLKKQFDKSPEKFLMYQHDPRTFEKLEVIMKQYANEKNPLAKYHEETGEYLTKYSKKNNGPIVKSLKYIGNKLGSHLDVTHQFKSSTKKLVKLSIKNYRFDVYLTEKGYKFVTIAYLNVFKKDNYYYIPKDKYQELKEKKKIKDTDQFIASFYKNDLIKLNGDLYKIIGVNSDDRNIIELDYYDIKYKDYCEINNIKGEPRIKKTIGKKTESIEKFTTDVLGNLYLHSTEKAPQLIFKRGLGGSGGSGGSGGSGGSGGSGGSGGSGGSTLNIEDEYRLHETSKEPDVSLGSTWLSDFPQAWAETGGMGLAVRQAPLIIPLKATSTPVSIKQYPMSQEARLGIKPHIQRLLDQGILVPCQSPWNTPLLPVKKPGTNDYRPVQDLREVNKRVEDIHPTVPNPYNLLSGLPPSHQWYTVLDLKDAFFCLRLHPTSQPLFAFEWRDPEMGISGQLTWTRLPQGFKNSPTLFNEALHRDLADFRIQHPDLILLQYVDDLLLAATSELDCQQGTRALLQTLGNLGYRASAKKAQICQKQVKYLGYLLKEGQRWLTEARKETVMGQPTPKTPRQLREFLGKAGFCRLFIPGFAEMAAPLYPLTKPGTLFNWGPDQQKAYQEIKQALLTAPALGLPDLTKPFELFVDEKQGYAKGVLTQKLGPWRRPVAYLSKKLDPVAAGWPPCLRMVAAIAVLTKDAGKLTMGQPLVILAPHAVEALVKQPPDRWLSNARMTHYQALLLDTDRVQFGPVVALNPATLLPLPEEGLQHNCLDILAEAHGTRPDLTDQPLPDADHTWYTDGSSLLQEGQRKAGAAVTTETEVIWAKALPAGTSAQRAELIALTQALKMAEGKKLNVYTDSRYAFATAHIHGEIYRRRGWLTSEGKEIKNKDEILALLKALFLPKRLSIIHCPGHQKGHSAEARGNRMADQAARKAAITETPDTSTLLIENSSP

SEQ ID NO: 521 - protein, 1762 aa, synthetic construct
MNQKFILGLDIGITSVGYGLIDYETKNIIDAGVRLFPEANVENNEGRRSKRGSRRLKRRRIHRLERVKLLLTEYDLINKEQIPTSNNPYQIRVKGLSEILSKDELAIALLHLAKRRGIHNVDVAADKEETASDSLSTKDQINKNAKFLESRYVCELQKERLENEGHVRGVENRFLTKDIVREAKKIIDTQMQYYPEIDETFKEKYISLVETRREYFEGPGQGSPFGWNGDLKKWYEMLMGHCTYFPQELRSVKYAYSADLFNALNDLNNLIIQRDNSEKLEYHEKYHIIENVFKQKKKPTLKQIAKEIGVNPEDIKGYRITKSGTPEFTSFKLFHDLKKVVKDHAILDDIDLLNQIAEILTIYQDKDSIVAELGQLEYLMSEADKQSISELTGYTGTHSLSLKCMNMIIDELWHSSMNQMEVFTYLNMRPKKYELKGYQRIPTDMIDDAILSPVVKRTFIQSINVINKVIEKYGIPEDIIIELARENNSDDRKKFINNLQKKNEATRKRINEIIGQTGNQNAKRIVEKIRLHDQQEGKCLYSLESIPLEDLLNNPNHYEVDHIIPRSVSFDNSYHNKVLVKQSENSKKSNLTPYQYFNSGKSKLSYNQFKQHILNLSKSQDRISKKKKEYLLEERDINKFEVQKEFINRNLVDTRYATRELTSYLKAYFSANNMDVKVKTINGSFTNHLRKVWRFDKYRNHGYKHHAEDALIIANADFLFKENKKLQNTNKILEKPTIENNTKKVTVEKEEDYNNVFETPKLVEDIKQYRDYKFSHRVDKKPNRQLINDTLYSTRMKDEHDYIVQTITDIYGKDNTNLKKQFNKNPEKFLMYQNDPKTFEKLSIIMKQYSDEKNPLAKYYEETGEYLTKYSKKNNGPIVKKIKLLGNKVGNHLDVTNKYENSTKKLVKLSIKNYRFDVYLTEKGYKFVTIAYLNVFKKDNYYYIPKDKYQELKEKKKIKDTDQFIASFYKNDLIKLNGDLYKIIGVNSDDRNIIELDYYDIKYKDYCEINNIKGEPRIKKTIGKKTESIEKFTTDVLGNLYLHSTEKAPQLIFKRGLLGGSGGSGGSGGSGGSGGSGGSGGSGGSTLNIEDEYRLHETSKEPDVSLGSTWLSDFPQAWAETGGMGLAVRQAPLIIPLKATSTPVSIKQYPMSQEARLGIKPHIQRLLDQGILVPCQSPWNTPLLPVKKPGTNDYRPVQDLREVNKRVEDIHPTVPNPYNLLSGLPPSHQWYTVLDLKDAFFCLRLHPTSQPLFAFEWRDPEMGISGQLTWTRLPQGFKNSPTLFNEALHRDLADFRIQHPDLILLQYVDDLLLAATSELDCQQGTRALLQTLGNLGYRASAKKAQICQKQVKYLGYLLKEGQRWLTEARKETVMGQPTPKTPRQLREFLGKAGFCRLFIPGFAEMAAPLYPLTKPGTLFNWGPDQQKAYQEIKQALLTAPALGLPDLTKPFELFVDEKQGYAKGVLTQKLGPWRRPVAYLSKKLDPVAAGWPPCLRMVAAIAVLTKDAGKLTMGQPLVILAPHAVEALVKQPPDRWLSNARMTHYQALLLDTDRVQFGPVVALNPATLLPLPEEGLQHNCLDILAEAHGTRPDLTDQPLPDADHTWYTDGSSLLQEGQRKAGAAVTTETEVIWAKALPAGTSAQRAELIALTQALKMAEGKKLNVYTDSRYAFATAHIHGEIYRRRGWLTSEGKEIKNKDEILALLKALFLPKRLSIIHCPGHQKGHSAEARGNRMADQAARKAAITETPDTSTLLIENSSP

SEQ ID NO: 522 - protein, 7 aa, synthetic construct
PKKKRKV

SEQ ID NO: 523 - protein, 19 aa, synthetic construct
MKRTADGSEFESPKKKRKV

SEQ ID NO: 524 - protein, 30 aa, synthetic construct
MDSLLMNRRKFLYQFKNVRWAKGRRETYLC

SEQ ID NO: 525 - protein, 20 aa, synthetic construct
AVKRPAATKKAGQAKKKKLD

SEQ ID NO: 526 - protein, 25 aa, synthetic construct
MSRRRKANPTKLSENAKKLAKEVEN

SEQ ID NO: 527 - protein, 9 aa, synthetic construct
PAAKRVKLD

SEQ ID NO: 528 - protein, 9 aa, synthetic construct
KLKIKRPVK

SEQ ID NO: 529 - protein, 8 aa, synthetic construct
VSRKRPRP

SEQ ID NO: 530 - protein, 10 aa, synthetic construct
EGAPPAKRAR

SEQ ID NO: 531 - protein, 12 aa, synthetic construct
PPQPKKKPLDGE

SEQ ID NO: 532 - protein, 21 aa, synthetic construct
SGGSKRTADGSEFEPKKKRKV

SEQ ID NO: 533 - protein, 268 aa, Methylocella silvestris
IETRREVEAFEANSQSNLKRIADQLLHRKFIFPAAKGVPIQKAKGKRGDIRPLVVAKVEARIVQRAIHDVLIEVPSIRRYVRTPYSFGGVRKEKDDSVSAVPAAIDAAMAAIGDGFSYYIRSDITAFFTKIPKSAVAALVSDAVGHQSEFMDLFRRAIHVELENMARLARTVNAFPIYDIGVAQGNSLSPLLGNILLYDFDQQMNGNPDAVCLRYIDDFIIFAKTQQLAENMFQKAIHILASHGMSVAKHKTVKGLVRDKFEFLGIEF

SEQ ID NO: 534 - protein, 263 aa, Nitrosospira multiformis
PTIRTEIEQFSLSLEKNLRRIADQLREKRYVFSQSYGVAVKKKNNPSKKRPIVISPIPNRIVQRALLDVVQEIPSVRAKLDSGFNFGGIAEIGVPQAILKAYKTALEKPYFIRTDICAFFDNIPRSQALEIITSASKDDDFNTLLTQATTTELSNLITLGRDKELFPLEGKGVAQGSCLSPVLCNLLLDDFDKKMNARGIVCIRYIDDFILFAPSESKAFKAFASASAFLEKLNLSVYDPRHSPDKAEHGVSNKGFEFLGCSV

SEQ ID NO: 535 - protein, 267 aa, Pseudomonas syringae
SSDEIKRDAEEFESRLPDSLVEIQRSLSKQTFTFLQQTGVAQKKPGGKARPLVLAPIPNRVVQRALLDVLQRRVRFVRKVLDTPTSYGGIPTKRVAMAISDARDAMRNGARFHIRSDIPAFFTKINKDRVQDLLRSHINCDATLKLLDLAITTDLANIDDLRRQGLNEIFPIGIEGVAQGSPLSPLLANIYLADFDVAMNADGITCLRYIDDFLLLGESLSNVDRAFNRALKTLDKIGLSAYDPRVDKVKASRGSTDKGFDFLGCNV

SEQ ID NO: 536 - protein, 245 aa, Clostridium saccharogumia
GIDGVMLSQLKEYLILNWQDIENQLILGTYEPNIVQVYELLSKKGKVREIYKFTIIDNFIQKAVSLILQDKLDCLLSDNNYSFRKGKGTIDVIRKGLELIEEGYEYIVEIDIKKYFENIDHVLLSKMLFDIIDDKVLISLIMKYQNCLIQKDGKIKRKNKGLITGSSISPVISNLYLMDLDRQYLEYNYIRYCDNIYIFINNKDDGLTLINDISKCLKDKYKLEINQNKTSITHYLSKRMLGYYF

SEQ ID NO: 537 - protein, 247 aa, Lachnoanaerobaculum saburreum
GIDGLYLSELRDDWNINGERYLSLLRKGKYKPGIVQIYEIVNYTGKRRSISSFNSIDRLVLRCLATSLEKYYDSIFSSSSFAFRPGLGVDKAVATFANNLNTGLTRVAIIDIKHYFDSIPIDRLEMILKRIIDDNVLLSLFHNLLYCRISEENVIKTKSKGILQGSPISPFLGNLYLSLLDTQLESMHVSFCRYCDDIAMFFASFEEAKETYTKVYDILKNDLEMDINPQKSGIYEGIKQNYLGYSF

SEQ ID NO: 538 - protein, 247 aa, Lachnoanaerobaculum saburreum
EIDGLHLSELRDYWDINGERYLSMLRAGKYKPGIVQIYEIINYTGKRRSISSFNSVDRLILRCLATSLEKYYNSIFSACSFAFRPGLGVDKAVAAFVSNLNKGLDKVVVIDIKHYFDSIPIDRLEMILKRIIDDKILLSLFHKFLYCRISEENIIKTKNKGILQGSPISPFLGNLYLSLLDTQLESMQIQFCRYCDDITMFFSSFDEAKEAYTKVSNILKNDLEMDIHTQKSGIYEGIKQNYLGYNF

SEQ ID NO: 539 - protein, 249 aa, Eubacteriaceae bacterium
GIDGIFVKDFEEYWILNGQKILKQVMNGVYMVSPVQLREIIMPTGKHRIIAHYTCTDRLITRILAESLQKEVDDSLSEYSYAYRKQRGVIKAVEQAAAYMQAGKIWVLELDIENYFNNINLTLMEEKIREIILDKNLFSLMEQYLRCEVMEEEYTKTYIKDKGLVQGCSLSPVLSNIYLNKLDQQMEKEGLSFCRFGDNINIYFYNKLEAAEWYAKIKAIIENEFDLHLNIRKSGIYLGVNRIFLGYSF

SEQ ID NO: 540 - protein, 247 aa, Roseburia inulinivorans
GLDGVKLSELRAYWETNGKKIKESIFNGTYKVGAVEQRQIVNRKGKKRTISLMNSIDRFIFRALYQKMASEWEKQFSQYSYAYQNNKGVLTAVEQAAKYMEEGKDWSVELDIQNFFDNINHSIIISKLKAGIEDVRVLDLLIAYLTCTLLDDHAFHQMEQGVLQGGPLSPLLANVYMNELDHYMEKQGYSFGRFGDDINIYCSTYEEATVAFSDVTARMEKIEQLPLNHGKTGIFKGINRKYLGYRF

SEQ ID NO: 541 - protein, 242 aa, Magnetoovum chiemensis
GPDTITTDDLKKAGDQFLDKLKNNIVNGNYKQGKTKQYRIPKNDDTFRYIYVLNTTDRLVHKTIADYISPIVDNIISNSAYAYRRGLNTKGAANALNNALKEGYTSGIKADISEFFDSINISALSMMIDSLFPFEPLADFINGILENNTRDGIKGILQGSPLSPLLSNLYLTRFDSDMESKGFFKLIRYADDFVLLLKTASSYEETIKHVEDSLSTLGLKLKPEKTTEITQGKAINFLGYVI

SEQ ID NO: 542 - protein, 252 aa, Desulfobacca acetoxidans
GLDGVSVQSFGDQAASHLEDLRQALQAGNYTPEPHQRIKVPKLDGSGELRPLSLPTIKDKIVQEAVRRIIEPLFEPEFLPCSYAYRPGQGPRRAIGRAIHYLEHDKCRWAVHADFDKFFDTLDHEVLLRRLQEKIKELPVLKLVRMWLRTGSIGAKGTYDDADLGVGQGGILSPLLSNIYVHPLDVYLTDKGHRYIRYADNVLILADSQPRGTEGLNDLIYFSQEMLKLRLNPEAKPLRHVADGFTFLGIHF

SEQ ID NO: 543 - protein, 252 aa, Brocadia fulgida
GLDGVEIDDQHTDADKMVSALIKELRTGAYVPVPYARGAIPKFDEQNQWRKISLPSVRDKVVQQAFVEALGPVFNKTFLDCSYAYREGKGPVKAIKRVEHILHTHHIRWVTTMDIDNFFDTMDHDIFIGEFTKKVAEPEILQLVRLWLKAGCISARGDWIEPYDGIAQGAVVSPLFSNIYLHPLDCFAIGNNCLYVRYSDNLIVLSETKETLYLWYEQLKSFLEDRLRLRLNEDPYPFKDKERGFVFLGIFF

SEQ ID NO: 544 - protein, 253 aa, Scalindua brodae
GLDNVTVESFGNRLDQHISKLQKEIMEHRYVPKPLKSIHVPKYNKENEWRGLALPSVSDKVVQAALLQVVEPLGEKLFMDSSYAYRKGKGHYKAIRRVEHCLGNRKKSWVVHRDIDNFFDTLNYDRLIDQFSALVDGEPVMTELVALWCRTGLVEAGGRWRGVQSGIRQGNIISPLLSNLYLHPLDEFAARLRIDWVRYCDDYLILCDSRKDAISADRLIKEYLKEPLCLKLNNSGLSPCHIDEGFTFLGVSF

SEQ ID NO: 545 - protein, 253 aa, Jettenia caeni
GLDGITVEEFGHRLDQHITKLQKDIRERRYIPQPAAVTYIPKFNEENEWRELGLPSVADKVVQAAMLEVVEPLAEKMFLDCSYAYRPGTGHYKAIRRVENSLNNRKKTWVVQRDIDNFFDTVDHNRLMEQFSALVQGEPTMVELVALWCRMGLVEKNGRWRNVQAGIRQGGVISPLLANLYLHPLDVFATKLGVDWIRYADDYVILGESQEEVVSSDVQIVEFLKDSLGLMLNRDESSPKHIDEGFTFLGVRF

SEQ ID NO: 546 - protein, 249 aa, Magnetomorum sp.
GVDGVTISSFNANLEVNLSELSNQILTNQYTPEPLQAAHIPKPGKSEKRQLGLPSLKDKIVQSSLASILSDFYEIHFSNCSYAYRPGKGSVKAIGRVRDFLNRKNYWIASVDIDNFFDSVDHEICTSILKEQISDQSIIRLISLYFSSGMIKFDQWQDTEIGIPQGGAISPVISNIYLNKLDHFLHTLNAFFVRYADDIILFSNTQQSLSETYQKTNEFLNKKLNLKLNALDNPIINVSKGFSFLGIYF

SEQ ID NO: 547 - protein, 249 aa, Magnetoglobus multicellularis
GIDGVSISEFETARDKNLQELSQQILYSQYTPEPLQAVQIPKPGKTEKRQLGLPSLKDKIVQSSLASLLSDFYDPLFSNCSYAYRPQKGSVRAIGRVKDFLNRKNHWAAPVDIDNFFDTVNHETCISILQDKISDIDIIRLIRLYFSSGKIQFDKWQDTIIGIPQGGALSPVLSNVYLNELDQYLHAIQANFVRYADDIILFANTRQFLLDFYEKTRHFLESKLQLKLNQTSHPVMSMEKGFAFLGIYF

SEQ ID NO: 548 - protein, 243 aa, Hippea sp.
RVSLKREIHLPEKEIENLFRALQNSTYIPEPPQKIELKKHDKIRPITIASKKDKIVQALLHEYLTELFDSSFSDKSYAYRPNKGPLKAVNRTFDYIKRGEKYVLKTDIKDFFETIDHSLLICMLKEKIKDDSLIDLIMMYIKIGTVKNLEYEDHNLGVHQGNIISPILSNIYLDRMDKFLERHGFNFVRFADDFVVFAKTHDRIELIHRNLKRFLKVYKLGLNEEKTYITTTDSGFAFLGAYF

SEQ ID NO: 549 - protein, 248 aa, Arcobacter butzleri
GLDNISYIEFKQNFTSQIKELIETILKGTYSPEPLKKIEIQKEDSLEKRPIALSSIKDKLVQRVLYKALNDYFDETFSNKSYAYRKDKSTLNAINRVGQFIQEQNHFILKTDIDNFFESINHDKLLTILDKHIQDKSIIRLISLFLQIGSFKEFDYFEHEDGVHQGDILSPLLSNIYLDLMDKWLEKYDIFFVRYADDFVVFSKKEDELKTIKENLEKFLESLDLKFGIDKTYFTTIQKGFSFLGVYF

SEQ ID NO: 550 - protein, 244 aa, Campylobacter geochelonis
GIDNLSELNEHFIHKLKQSCLNQTYVPEPVLQKLIPKSDGENYRKLAISSLKDKLIQKVLANELAWYFDKHFSDKSYAYRPGKSYKNAIFRLRDFLRVKPYFVIKSDIKDCFESINHSKLVALLAKYIKDKRVLNLVEIWIKNGIFNRQTYIKHSKFGIHQGDVLSPLLANIYLNQMDKFLETNNEIFIRYADDFVILADDEKFVQAKINSLKTFLSTIDLSLKDTKTAIYSPTQSFEFLGVSF

SEQ ID NO: 551 - protein, 245 aa, Campylobacter concisus
GLDELSMDELCTEAFFAELKDEILNLSYSPQPLKRAFIPKENKDEFRKLAIPSLKDKFTQNILIGELSSYFDKGFSNRSYAYRSGKSYSNAIFRARDFCLTHDFVLKTDIKDFFENINHEKLLEILRSNIKDTRIIRLIELWIKNGIFEHFDYTSHTKGVHQGDVLSPLLSNIYLDQMDKFLEHSSIEFVRYADDFVLFFGSREACEQALAGLKDFLVTINLSLNEAKTSLHDKDSEFTFLGVNF

SEQ ID NO: 552 - protein, 245 aa, Campylobacter gracilis
GFDGLSADDICSGEFYAELKSEIFSLSYSPQPLKRAFIPKEAKDELRKLAVPSLKDKFVQNILTRELSGYFDKSFSNRSYAYRNGKSYANAIYRARDFFQIFSFAVKTDIKDFFENIDHEKLLEILRANIRDARIIRLIELWIKNGIFERFDYRAHTKGVHQGDVLSPLLSNIYLNQMDKFLENSGVEFVRYADDFVMFFASYEAAEMRLARLKDFLKTISLSLNEAKTSIHGKDSEFVFLGVSF

SEQ ID NO: 553 - protein, 245 aa, Fretibacterium fastidiosum
GQTIDAFRRDRDRNVTRISDSLKNGTYAPSPLRGVKISKNGGGFRRLGVPTVKDRIVFQGANRLLADVWDPLFAPLSFAYRSGRSIADAIDAVIERIRKGRVWFVKGDIKGCFDELSWDVLSACLHDWLPDESLRRLVNQAIRVPVVEGGQIRPRLRGIPQGSPLSPLLANLYLHSFDLQMLQQGFPVIRYADDWLLLVGSEPEAQAALQTAQGILSVLNIAINEEKSGIGNLRCESVAFLGHRI

SEQ ID NO: 554 - protein, 221 aa, Shigella boydii
LCQVFGVHRSSYRYWKNRPEKPDGRRAVLRSQVLELHGISHGSAGARSIATMATRRGYQMGRWLAGRLMKELGLVSCQQPTHRYKRGGHEHVAMPKWVILYCRRWMEAPMQSCENGELITRTRGTPQGGVISPLLANLFLHYAFDLWMEREYRGVPFERYADDIVVHCSRMSDATRLKNRLSERFSEVGLVLNAGKTNIAYIDTFKRRNVATSFTFLGYDF

SEQ ID NO: 555 - protein, 248 aa, Bacteroides salyersiae
GVDGFTVAHFEKKLTDNLTELHHELVTGTWNPEPYLRVEIAKNETEKRKLGLLCIKDKIVQQAIKTAIEPQMDKTFLNISYGYRPGKGAERAIRRTIQELKKLKNGYIAKLDIDNYFDNINQERLFTRLGNWLKDDETLRLIKLCVQTGIVNPQLKWERTTKGIPQGAILSPLLANFYLHPFDQFAISKAPMYIRYADDFLIASPSEKQTKEAVELIKEELADTFYLQLNKPLVCNFHDGVEFLGIIV

SEQ ID NO: 556 - protein, 248 aa, Bacteroides fragilis
GIDGFTLSHFEKRLNDNLIELQHELISQTWNPEPYLRIEITKNETEKRKLGLLCIKDKIVQQAIKTAFEPQLEKTFLNLSYGYRPNKGPERAIKRVVHDLKKLKSGYVAKLDIDNYFDTINHERLFTRLANWLKDDETLRLIRLCIQTGIVTPQLQWQEINKGVPQGAILSPLLANFYLHPFDQFAANKVPMYIRYADDFLIATSTEKQIKEAVELVKEELESQFYLQLNTPIIHNFHDGIEFLGITI

SEQ ID NO: 557 - protein, 256 aa, Nostoc sp.
GVDGKKALEPSQRLALYEVLVKNWKQWKHQPLKRVYIPKADGTRRGLGIPTISDRAYQCLIKYALEPAAEAMFNARSYGFRPGRSCHDVQKLLFSNLNGGQANGLSKRILELDIERCFDKIDHKFLMQSVQLPKAAKQGIFWAIKAGVRGEFPSSESGTPQGGVISPLLANIVLHGLENVGHELRYKVRSGGRQIDTIKGFRYADDVVFLLKPEDNPEALRQNIDTFLEARGLKVKEAKTKIVHSTDSFDFLGWNF

SEQ ID NO: 558 - protein, 236 aa, Anabaena sp.
GVDGKASLTYKERVELDKLLMEQVNTWTHSKLREIPIPKKDGTKRILKVPTIKDRAWQCIIKYTIEPAHEAIFHERSYGFRPGRSTHDAQKYLFDNLRSQSHGKDKIILEMDIEKCFDRISHNHLMSQIIAPQSVKLGVWKCLKAGVNPEFPEQGTPQGGVCSPLLANIALHGIEAIHKSVRYADDMVFIFKKGDDQAKVFDEITEFLRIRGLNIKTAKTRFVPATTGFNFLGWKF

SEQ ID NO: 559 - protein, 224 aa, Nostoc sp.
GCGESRTPRFNREVRRIIPPIDSNQCLAKYALEPAHEATFHEHSYGFRPGRSTHDAQSQIANYLASSKGGINKRILELDIEKCFDRINHSTIMSNLIAPQGLKQGIFRALKAGINPEFPEQGTPQGGVVSPLLANIALNGIEDLHQYHDCNYKKITPSTPERNIKKACVRYADDMVFFLRPEDDAEEILEKISQFLAQRGLKISEKKTKLTASTDGFDFLGWNF

SEQ ID NO: 560 - protein, 235 aa, Crocosphaera watsonii
GIDGIKSLNFKQRFALAERLLKAHDWKHSKLREIPIPKKDGTTRMLKVPTMADRAWQCLVKYALEPAHEALFHARSYGFRPGRSTHDAQKILFLNLKSDSNGLNKRILELDIEKCFDRINHTSIMERVIAPQTIKTGIWRCLKAGVNPEFPEQGTPQGGVVSPLLANVALDGIEDIHYSIRYADDMVVILKPKDDADKILKDIQEFLAARGLKVSEKKTKLVRATEGFDFLGWHF

SEQ ID NO: 561 - protein, 258 aa, Rivularia sp.
GIDGKKSLTFEERFALEELLKAKSSKWKHQKLRAIPIPKKDGTTTRLLKIPTLADRCWQCLAKYALEPAHEATFHKHSYGFRTGRSAHDAQKQVFQNLKSSSNGINKRILELDIEKCFDRINHSSIISNLIAPNRLKLGIFRCLKVGINPDFPEQGTCQGGVVSPLLANIALNGIEELHKYHTNKGRKIKATTPEKDINTACVRYADDMVFFLRPEDDEKEILDNISQFLAKRGLKVSEKKTKLTASTFGFDFLGWHF

SEQ ID NO: 562 - protein, 256 aa, Nostoc sp.
GIDGVKSLDFNGRFELEITLKQSSGNWHHQELREIPIPKKDGTTRMLKIPTIADRCWQCLAKYALEPAHEATFHARSYGFRTGRAAHDAQQFLFSNLSSKAKRISKRVIELDIEKCFDRINHSTIMENLIAPKGIKLGIYRCLKAGINPEFPEQGTPQGGVVSPLLANIALNGIESIHRYHKDNQRITNKTPESDIRYPSVRYADDMVIVLRPQDDANEILAKIEDFLNARGMKVSAKKTKITATTDGFDFLGWHI

SEQ ID NO: 563 - protein, 256 aa, Calothrix sp.
GIDGKKSLTFRERFELSELLKASCNNWKHQGLREIPIPKKDGTTRMLKIPTMADRAWQCLAKYALEPAHEATFHARSYGFRSGRSAHDAQTVLLTHLRSNNNGINKRVIELDIEKCFDRISHTSIMENLIAPKGVKLGIFRCLKAGINPEFPEQGTPQGGVVSPLLANIALNGIESIHRYHRNGSKITNKTAGKDITEPSIRYADDMVIIIRPQDDAQKILADIDSFLAARGMKVSEKKTKITAATDGFDFLGWHF

SEQ ID NO: 564 - protein, 256 aa, Anabaena cylindrica
GIDGKTALTFEQRFQLSEKLRTEANNWKHQGLREIPIPKKDGKTRILKVPTIADRAYQCLVKYALEPAHEATFHARSYGFRTGRSAQDAQKYLYTNLNSSVNGIEKRVIELDIEKCFDRINHTAIMDRLIAPYSIRLGIFRCLKAGVNPEFPEQGTPQGGVVSPLLANIALNGIESIHRYHIQGLRITNKTKGYKIVEPSVRYADDMIIILRPEDDAKEILDKISRFLAERGMKVSEKKTKLTATTDGFDFLGWHF

SEQ ID NO: 565 - protein, 236 aa, Crinalium epipsammum
GIDGKASLNHEERFALSEELRTRSSKWKHQKLREIPIPKKDGTTRLLKVPTIGDRAWQCLVKLALEPAHEATFHAKSYGFRTGRAAHDAQKYLFDHLRSTSHGIEKRVIELDIEKCFDRIAHKSIMERLIAPSGIKLGIYRCLKAGVNPEFPEQGTPQGGVVSPLLANIALNGIEDIHQSVRYADDMVFILKPKDDAVAILEQISQFLAERGMKISEKKTKLTATTDGFDFLGWHF

SEQ ID NO: 566 - protein, 236 aa, Oscillatoria nigro-viridis
GIDGRASLTFEERLALSEELRAKSNNWKHQKLRSIPIPKKDGSTRLLKIPTIADRAWQCLAKYALEPAHEATFHARSYGFRTGRSAHDAQKFLFLNLSSKAHGISKRVIELDIEKCFDRISHTSIMERLIAPKGIKTGIFRCLKSGVNPGFPEQGTPQGGVVSPLLANIALNGIEEIHRSVRYADDMVIILKPKDDAKAILDKVSEFLAARGMKVSEKKTKLTATTDGFDFLGWHF

SEQ ID NO: 567 - protein, 259 aa, Bacillus megaterium
GVDGYTASKPNERIKLYQQLVKCNVFRHRPKPAKRTFIPKKNGKLRPLGIPTMRDRVYQNVVKNALEPQWEVKFEPTSYGFRPKRSTHDAISNLFNKLNTNSKKKWVFEGDFLGCFDHLNHNWIMEQTSMFPGNTLIKRWLNMGYIEQDMLHTTTEGTPQGGIVSPLLANIALCGMEEEIGIVYKKTYKSNGGYKIDPKKIGRVLYADDFVIVTETKEQAESMYQNLTPYLRKRGITLSKEKTRVTHIEDGFDFLGFSL

SEQ ID NO: 568 - protein, 257 aa, Bacillus cereus
GIDGYISNTPQERVELFNKLSRYSVRNIKVKPARRTYIPKKNGKLRPLGIPVIVDRVYQNAFKNALEPQWEAKFEMTSYGFRPKRSTHDAMSDLFTKLSKGSAKGWIFEGDFEGCFDNLNHDYIMGCINNFPNKSIIRDWLESGYVDNDVFNETTKGTPQGGIISPLLANVALHGMEKEIGVRYIHTTRQGDTLYSNSVGVVRYADDFVIVCPTEEEAYGMYDKLEPYLNKRGLNLAKDKTRVVHISKGFDFLGFNF

SEQ ID NO: 569 - protein, 257 aa, Bacillus anthracis
GIDGITTNTPEDRVKLFHLLKGYSVRNIKAFPVKRAYIPKKNGKKRPLGIPVIKDRIFQNMVKNALEPQWECRFESMSYGFRPKRSAHDAMANLFLKLSRGTNRAWIFEGDFQGCFDNLNHEHILSCIEGFPYSNAINQWLNAGCIDNKTFYKTETGTPQGGIISPLLANIALHGMEKELGVRYHFPKRDGAMLYPDSIGIVRYADDFVIVCNSKEEAESMYAKLQPYLDKRGLKLAEEKTRVVHITDGFDFLGFNF

SEQ ID NO: 570 - protein, 267 aa, Crocosphaera watsonii
GVDGKKSLRPNQRLKLVNELRLKGYKAKALRRVWIPKPGRDEKRGLGIPTMKDRAMQALVKSALEPYWEAQFEGTSYGFRPGRSAQDAISRIFLAIKTNAKYVLDADIAKCFDKINHDYLLSKVDCPHNIKRIIKQWLECGVMDKGIFEETDSGTPQGGVISPLLANIALHGMIIDIENHFPRTKRREDGSLKQGYKPKIIRYADDFVILHTDYDVILQCKNLVAQWLEKVGLELKPEKTSIRHTLKSIVHNGKTIEPGFDFLGFNI

SEQ ID NO: 571 - protein, 259 aa, Trichodesmium erythraeum
GIDGIKNLPSMQRFNLVDLLKRHRFKASPTRRVWIPKPGKDEKRPLGISTMYDRALQALVKLGRSPEWEAHFEPNSYGLRPGRSTHDAIAAIYVSINKKPKYVLDADISKCFDRINHDALLRKIGRTPYRRLIKQWLKSGVFDNKQFSDTLEGTPQGGVISTLLVNIALHGMEKCLEKYAETLPGKKRDNKQALSLIRYADDFVILHEDIKVVMQAKTVIQEWLNQVGLELKPEKTKIAHTLEEYEGNKPEFDFLGFNI

SEQ ID NO: 572 - protein, 262 aa, Calothrix sp.
GIDGVKSLKPSARLTLVMNMKLNHKVKATRRVWIPKPGNVEKRPLGIPTMQDRATQSLVKLALEPEWEAKFEPNSYGFRPGRNAHDAREAIFNSIRYSNKWVLDADISKCFDKINHEKLLTKINTFPTMRRQIKAWLKAGVLDNGHFSETTEGTPQGGVISPLLANIALHGLEKLVKEFAASQRGGKVKNQNSISLIRYADDFVILAPNKTQIIVLKEIVKTWLAEMGLELNPNKTRIVSTFKSSEIFASQEVGFNFLGFNV

SEQ ID NO: 573 - protein, 261 aa, Nostoc sp.
GVDGRKNLSPKARLILVQSMKLGDKASPTRRVWIPKPGSSGEKRPLSIPTLYDRALQSLVKLALEPEWEARFEPNSFGFRPGRNAHDAMKAIFNTIKFKPKYVLDADIAKCFDKIDHNVLLSKLNTFPTISRQIRAWLKAGVIDFSEYALHTTSMGVPQGGTISPLLANIALHGMENRIKQVALTLPGCKSENRQAISLIRFADDFVILHKDLAVIQRCQQIISEWLSELGLELKPSKTRISHTLNMYEGKVGFDFLGFTV

SEQ ID NO: 574 - protein, 247 aa, Gloeobacter violaceus
GVDGVKSLTPKARLALTKNLRISEKAKPMRRVWIAKPGTQEKRPLGIPTMTDRARQALLTLALEPEWEARFEPNSYGFRPGRSCHDALQAIYNAIRQQSKFVLDADIAKCFDRIDQQALLKKMNTSSAIRRQIRAWLKAGVMEGSELFPTPTGTPQGGVISPLLANIALHGMEERVKQVSKMAQLIRYADDFVCIHTDQQIVQSCQTVLEEWLAGMGLELKPSKTRIAHTLLLEEGQPGFDFLGFTV

SEQ ID NO: 575 - protein, 157 aa, Thioalkalivibrionitratireducens sp.
MQRCFLSLAKRSSAEWILEGDIRACFDAFDHDWLIEHTPTDQGRLRAWLKSGFMEQRRIFPTERGTAQGGIISPTVANMVLDGLEGRIRARFKRRGKVNLIRFADDFVITGESRAILENDVTPLVTEFLHERGLVLAPEKTRIVHIDDGFDFLGFRF

SEQ ID NO: 576 - protein, 196 aa, Xenorhabdus bovienii
MIDRTQQALHLLALDPISETIADPNSYGFRPNRSTADAIAQCFKCLCQKRSARWVLEEDLKACFDKIGYQWLIENIQIDKRMLKQWLGSDFIDKGLFYRTAEGTPQGGIISPTLMLLTLAGLEKRVKEVARKTDDRINSIEYADNFVMTGASEDVLLNEVKPQLIDFLRERGLTLSEEKTHITHINDGFDFLGFNL

SEQ ID NO: 577 - protein, 245 aa, Shewanella baltica
GIDGIIWNSDARCMTAVNQLSRKGYHAKPLRRIYIPKKNGKLRPLGIPCMIDRAQQALHLLALEPISETVADLNSYGFRPNRSAADAIAQCFKCLCMKRSSQWVLEGDIKACFDKIGHQWLIDNIQLDKRMLKQWLGCGYVDKGLFYKTAEGTPQGGIIPPTLMLLTLAGLEQLVKSIACKTGNSVNFIGYADDFIITGSSKEVLVNEIKPQLIGFLQERGLTLSDDKTHITHIDDGFDFLGFNI

SEQ ID NO: 578 - protein, 245 aa, Shewanella baltica
GIDGIIWNTDARRMKAVNQLSRKAYIAKPLKRIYIPKKNGKLRPLGIPCMIDRAQQALHLLALEPVSETLADPNSYGFRPNRSTADAVDQCFKCLAQKKSAQWVLEGDIKACFDKIGHQWLLDNITVDKRMLEQWLKSGFMDKGLFYRTDEGTPQGGVISPSLMLMTLAGLEQHIKSTALKKGTRANFIGYADDFVVTCASKEVLENDIKPLITDFLAERGLTLSEEKTHITHINDGFDFLGFNH

SEQ ID NO: 579 - protein, 245 aa, Shewanella sp.
GIDGVIWNTDARRIAAVKQLKRKAYQAKPLKRIYIPKKNGKLRPLGIPCMIDRAQQALHLLALEPISETVADPNSYGFRPHRSTADAIAQCFLCLSQRYSSEWVLEGDIKACFDKIGHQWLIDNIALDKKMLRQWLECGFMDKGLFYRTDEGTPQGGIISPTLMLLTLSGLEQLLKATARRKGCNVNFIGYADDFVVTGSSKEVLVNEIKPLIARFLAERGLTLSEEKTHVTHINDGFDFLGFNL

SEQ ID NO: 580 - protein, 248 aa, Methanosarcina barkeri
GIDGEKWLSSASKMKAVLSLTGKRYKAKPLKRVFINKPGKTKKRPLGIPTMYDRAIQSLYSLALEPVAEIKSDLRSFGFRKHRSTKDACQQIFLCLSKKTSAQWILEGDIRGCFDNINHQWLLTNIPIDKAILTQFLKAGFIYKRHLNPTKAGTPQGGIISPILANMTLDGIEKMLLVKYPKKGKNSKKVNFIRYADDFIVTANSKETAGEIKDEVVAFLKERGLELSDDKTFITNINEGFDFLGWNF

SEQ ID NO: 581 - protein, 256 aa, Clostridium pasteurianum
GVDKELWSTTASKMQAVLSLTDKNYKAKPLRRVYIEKKGKKAKRPLGIPCMYDRAMQALYALALDPVSEVTADTKSFGFRKNRCCQDACEYIFTALSRENCAKWILEGDIKACFDYISHEWLIENIPMDKSVLKQFLKAGFVFENELFPTDDGTPQGGVISPILANMALDGMQKALSDRFHTNKLGRVDNRFQIANKVYLVRYADDFIVTAATKEIAEEAKELIREFLQTRGLELSEEKTKITHINDGFDMLGWTF

SEQ ID NO: 582 - protein, 256 aa, Streptococcus equi
GIDGELWTTPAQKMEALLSLTDKGYKASPLRRVYIDKKGKKKKRPLGIPTMYDRAMQALYALALEPIAETTADTKSFGFRKGRSCQDACEYIFTALSRKASPQWILKGDIKGCFDNISHDWLLENIPMDKSILKQFLKAGFVFKGELFPTEDGTPQGGIISSILANMALDGLQQVLSDRFHTNRLGRIDFRFKNSHKVNLVRYADDFIVTAATQEIALEAKELIREFLIGRGLELSEEKTLVTHINDGFDLLGWNF

SEQ ID NO: 583 - protein, 253 aa, Fibrella aestuarina
GVDGQLWTNPPRKRQAIDELRSRGYRPQPLKRIYIPKRNGKQRPLSIPTMKDRAMQALHLMALQPVSETTADPCSFGFRPARQVADAVERCFGLLSRQDSPQWVLEADIEACFDRIDHDWLLQHIPMEKTILGQWLKAGYIEKGNWWPTTEGTPQGGIISPVLANMALDGLAKELAAHFAKSYKRPDRGFNPKVRLVRYADDFIITGISRQQLEEQVKPVVCNFLSKRGLRLSESKTRQTAITEGFDFLGFTF

SEQ ID NO: 584 - protein, 250 aa, Pseudomonas stutzeri
GVDGKIWSTPVAKSTGAQALQHRGYRPQPLRRIYIPKSNGKKRPLGIPTMRDRAMQALWKLALEPVAETRADPNSYGFRPQRSTADAIAHCFNALAKRGSAHWVLEADIRGCFDNISHDWLLTNVPMDKVVLRKWLRAGYVDQGALFATEAGTPQGGIISPVLANWTLDGLEDVVHASVASTARKRKPFKIHVVRYADDFIITGATKAVLQHQVRPAIEAFLKERGLELSDEKTQITHISQGFDFLGQNV

SEQ ID NO: 585 - protein, 250 aa, Pseudomonas putida
GVDGKIWATPAAKSSGMESMRHRSYRALPLRRIYIPKSNGQKRPLGIPRMLCRSMQALWKLALEPVSESLADPNSYGFRPNRSTADAIEYCFITLAKRTSPVWVLEGDIRGCFDNFNHEWMLKNIPMDKTILRRWLQAGFIDEGTLFATQAGTPQGGIISPVIANMALDGLEAAVHASVGPTKRARERSKINVVRYADDFVVTGISKEILEHSVLPAVRQFMAIRGLELSEEKTKITHIAEGFDFLGQNV

SEQ ID NO: 586 - protein, 252 aa, Gammaproteobacteria bacterium sp.
GVDKVVWDTPEKKLCAMGDLKRRGYRPKPLKRVHIPKANGKLRPLGIPTMKDRAMQALYLLGLLPVSETTADGCSYGFRPERSVADAIERCFNALGRRDAAAWVLEADIKGCFDHISHDWLLGNVPMDKRVLATWLKCGFMEKAVWFATEAGTPQGGIISPTLANFALDGLEQLLSKTFYRTMRHGKMVHPKVHLIRYADDFVITGSSEELLVNEVKPLVERFLAERGLMLSAEKTKVTHIDEGFDFLGQNV

SEQ ID NO: 587 - protein, 252 aa, Bordetella petrii
GVDRVTWSTPETKSEAVLSLRRHGYRPRPLRRIYIPKANGKKRPLGIPTMRDRAMQALYLLALEPIAETTGDKDSYGFRPGRSVADAIRQCHTVLAWKRSAEWVLEADIEGCFDNISHDWLAENIPMDKAILKSWLKAGYVESGSLFPTEAGTPQGGIISPVLANMALDGLQEVLGKSFFRTRRQNKHYDPKVNFVRYADDFIVTGYSRELLEIEVLPLVEKFLAARGLNISKAKTRVTHISEGFDFLGKNI

SEQ ID NO: 588 - protein, 248 aa, Escherichia coli
GVDGKTWSKPGSKMKAIYTLKRRGYKPLPLRRIYIPKSNGKKRPLGIPTMKDRAMQALYLMALEPVAETTADPNSFGFRPCRSTADAIEQCFTTLHRADRAQWILEADIRSCFDEISHEWLIANIPTDTAILKRWLKAGYIDLGKLYPTSAGTPQGGIISPTLANMVLDGLQPLLKKTFYRGGLNPEKINIIRYADDFVITGISHDTLSEKVLPLLENFLAERGLTLSPEKTRITHISDGFDFLGMNI

SEQ ID NO: 589 - protein, 242 aa, Thermosynechococcus elongatus
GVDGITWSTQEQKTQAIKSLRRRGYKPQPLRRVYIPKANGKQRPLGIPTMKDRAMQALYALALEPVAETTADRNSYGFRRGRCTADAAGQCFLALARAKSAEHVLDADISGCFDNISHEWLLANTPLDKGILRKWLKSGFVWKQQLFPTHAGTPQGGVISPVLANITLDGMEELLAKHLRGQKVNLIRYADDFVVTGKDEETLEKARNLIQEFLKERGLTLSPEKTKIVHIEEGFDFLGWNI

SEQ ID NO: 590 - protein, 251 aa, Azotobacter vinelandii
GVDGETWSTPESKWKAIFRLQRTGYRPRPLRRVYIPKANGQRRPLGIPTMLDRAMQALYLLALEPVSETTADRNSYGFRPHRSTADAIEQLFVNLGRKHSAQWVMEGDIKGCFDNISHDWLIANVPLDKAVLRKWLKAGYLESGQLNPTGAGTPQGGIISPVLANLALDGLEKALESRFGQRNTKASYKTKVNYVRYADDFVITGISKELLVNEVKPVVAAFMAERGLSLAAEKSLFTHVSEGFDFLGQNV

SEQ ID NO: 591 - protein, 252 aa, Escherichia coli
GVDGQTWSSPEVKFLAINLLKRRGYKPQPLKRVYIPKSNGKSRPLGIPTMKDRAMQALYLLALEPVAEVTADQRSFGFRTGRSTADAIAQCFCVLAQKTSAEWVLEGDIRGCFDNISHQWLIDNTSTDRQILTKWLKAGYREKGQLFPVNSGTPQGGIISPVLANIALDGLEALLASEFKKRTVKGRLVNPKVNYVRYADDFIITGESKELLESQVLPVVRRFMAERGLMLSPEKTKITHIEEGFDFLGQNI

SEQ ID NO: 592 - protein, 253 aa, Pseudomonas aeruginosa
GVDGITWSTPEAKSQAMLSIKRRGYRPQPLKRVYIPKTNGKMRPLGIPTMKDRAMQALYLLALEPVAETTADGRSFGFRPERSTADAIEQCFTTLSKKVAPQWILEGDIKGCFDNISHDWLMGHVPTDREILRKWLKAGYMEDRQLFPTEAGTPQGGIISPTLANLVLDGLEAKLDAAFGRKRYANGVQTRLMVNYVRYADDFIVTGRSKELLEQEVMPIIKDFMQERGLTLSPEKTKITHIDDGFDFLGQNV

SEQ ID NO: 593 - protein, 252 aa, Orientia tsutsugamushi
GIDGITKEDYGKKLKANLLSLLTRIRKGQYQAKPARIVKIPKEDGGKRPLVISCFEDKIIESTVSKILNSVFEPIFLKYSYGFHPKLNAHDALRELNRLTYNFNKGAIVEIDITKCFNTIKHCELMEFLRKRISDKKFLRLVMKLIETPIIENDTIVTNKEGCRQGSIVSPILANVFLHYVIDSWFAKISEENLIGQTGMVRYCDDMVFVFESEADAKRFYDVLPKRLNKYGLNINEAKSQMIKSGRDHAAN

SEQ ID NO: 594 - protein, 270 aa, Legionella longbeachae
GIDGVTKEVYGKKLEDNLQDLLARIRRHAYTPQASRLVEIPKEDGSTRPLAISCFEDKIVQMAVTKLLTAIYEPLFLPCSYGYREGKNGHEALRALMKYSNEFRKGATLEIDLRKYFNTIPHGKLLEILEKKITDRRFLKLIRKLIRSPVVANGKAELNELGCPQGSIISPILSNIYLHSVVDSWFDEISKSHLIGKTAMVRFADDMVFLFQRSEDAEKFYKVLPKRLEKYGLQLHVDKSSLLKSGSKEAEEADTRGERLQTYKFLGFTC

SEQ ID NO: 595 - protein, 270 aa, Xenorhabdus nematophila
GIDRMTKAAYGEHLDGNIHNLILRIRRGTYRPKAARITQIPKEDGSKRPLAISCTEDKLVQLAVSDILSRIYEPLFLPCSYGFRPGLNCHAALKALQQQTYRNWNGAVVEIDIRKYFNTIPHIELMSLLRKKISDRRFLRLIEVLITAPVIEGKQVSENVRGCPQGSILSPVLANIYLHQVIDEWFDEISRSHIHGRAEMVRYADDRVFTFEFMSEAERFYKVLPKRLNKYGLELHDDKSQRIPAGHIAALRASQSGRRLPTFNFLGFTC

SEQ ID NO: 596 - protein, 270 aa, Acaryochloris marina
GVDGVTKAEYQENLETNLQNLHLKLRQMSYRPQPVRQVEIPKEDGSMRPLGISCTEDKVVQEMTRRILEAIYEPVFIDTSYGFRPKRSCHDALRQLNREVMRKPVNWVADIDLAKFFDTMPHQEILSVLSIRIKDGNLLRLIARMLKAGIQTPGGVVYDELGSPQGSIVSPVIANIFLDYVLDQWFTNVVRHHCRGYCAIIRYADDVAAVFEHEEDAIRFMRVLPRRLEKYGLRLNTKKTHLLAFGKRNARRCFQTGQRPSTFDFLGLTH

SEQ ID NO: 597 - protein, 270 aa, Stigmatella aurantiaca
GIDRQTAKDYEANLEVNLKSLLERIKSGRYKAPPVRRTYIPKADGSQRPLGIPTFEDKVAQRAIVLLLEPIYEQDFRPFSFGFRPGRSAHQALRELRSSILERNGRWVLDVDLRRYFDTIEHGKLREVLARRVADGVVRRMIDKWLKAGVLEEGPLLRLEQGTPQGGVISPLLANVYLHYVLDEWYEREVVPRMKGKCSLIRYADDLVMVFEDFLDCRRVLEVLGKRLAKYGLTLHPGKTRMVDFRFKRPGGGQHPATQATTFDFLGFTH

SEQ ID NO: 598 - protein, 252 aa, Rhizobium etli
GIDGRTADDYEKDLEANLESLRIRMMSGSYRAPPVRRHYIPKADGSRRPLGIPTIEDKVAQRAIVMLLEPIYEEDFLDCSFGFRPERSAHDAIRTLRDGIMDTGQRWVIDADISKYFDSIDHGHLRSFLDLRIRDGVIRRMIDKWLNAGVLDQGTSSRSVAGTPQGGVISPLLANILLLHVLDRWFVEVVKPRLKRRCQMVRYADDFVMSFEDHLDGRRMLAVLGKRFERYGLRLHPDKTRYVDFRFRRPHG

SEQ ID NO: 599 - protein, 266 aa, Niastella koreensis
GVDEETWIDYHKQRETRIPQLLAAFKSGNYRAPNIRRVYIPKDKGKLRPLGLPTVEDKVLQTAVTRVLRPVYEDIFYHSSYGFRPGKSQHQALEELTRQVSLEGKRYIIDADMQNYFGSINHQCLRDLLDLRIKDGVIRKMIDKWLKAGILDNGQLVYPTEGTPQGGSISPLISNVYLHYVLDEWFYQQIRPLLKGDSFLIRFADDFLLGFTNKEDALRVMHVLPKRLGKYGLMLHPEKTKLIDLTTKKGGPDQEKNTFDFLGFCH

SEQ ID NO: 600 - protein, 267 aa, Sorangium cellulosum
GVDGITKEQYGQDLEHNVRDLHARMKSMRYRHQPIRRVHIPKERGKTRPIGISCTEDKIVQAAVREMLEVIYEPVFRDVSYGFRPGRSAHDALRALNRMLLGGVEWILEADIESFFDSIDRTKLMEMLQARVADKSLLRLVGKCLHVGVLDGAEFYAPEDGTVQGSVLSPLLGNVYLHHVLDLWIEREVQPRLVGKATLIRYADDFIIGFEREDDAKRVTEVLPRRFERYGLKLHPDKTRLLPFGRPDNGQPGGKGPATFDFLGFTH

SEQ ID NO: 601 - protein, 259 aa, Chlorobium phaeobacteroides
GTDGKSWKTYEAQLEERLPKLHEEIHTGSYRAQPVKRVYIPKTDGQKRPLGITAIEDKLVQQAVVTVLNQIYETEFYGFSYGYRPGRAPENALDALATAILKRPINWILDADLQKFFDSIPHDKLMALISIRVGDKRILRLIGKWLKTGYIEDGKRYRQTEGTPQGSVISPLLANIYLHYVVDEWVEQERRRRNNGEVIIIRYADDLVLGFQYKTEAERYLEALSERVQTYGLKLHPEKTSLKEFGRYAEERRRKRGEE

SEQ ID NO: 602 - protein, 262 aa, Sorangium cellulosum
MYGEELDARLLDLQDRILRGSYHPQPVRRVHIPKGSGTRPLGIPALEDKIVQQAVRRGLELIYESMFLGFSYGFRPRRSTHDALDALAVAIGKRKVNWIVDADIRAFYDTIAHAWMQRFIEHRIGDRRLVRLLMKWLHAGVMEDGVLHEVDEGTPQGGIISPLMANIYLHYVLDLWAHAWRKRHARGEVYIVRYADDVVMGFEDGRDARSMRAALSKRLASFGLELHPDKTRVLFFGRYAYEKCERRGLRKPATFDFLGFTH

SEQ ID NO: 603 - protein, 271 aa, Paraburkholderia rhizoxinica
GVDGVTWQSYEVGLGSNLRDLHRRVHTGSYRALPVLRRYIPKADAGLRPLGVAALEDKLVQSVMVEVLNAIYEEDFLGFSYGFRPGRNQHDALDALAAAIQWRPVNWILDADIRSFFDTVNRQWLIRFVKHRVADPRVIRLIGKWLDAGVLDNGRLMSVQAGTPQGSVICPLLANIYLHYVFDLWIERWRRQRARGTVVVSRYADDTVVGCQHEADALRLMKELRQRMEEFDLTLHPEKTRVLEFGRYAAERRRRKGMGKPQTFAYLGFTH

SEQ ID NO: 604 - protein, 271 aa, unidentified
  source 1..271: note = uncultured bacterium
GVDEMTWRKYKEGSPGRIADLNERVHTGSYRAKPVRRSYINKSDGRKRPLGVTALEDKIVQQAVSTILNQIYETDFMGFSYGFREKRSQHNALDALYIGISRRKINYILDADISGFFDKINHDWLLKFLEHRVADRKILRLIKKWLKVGVIEDGKRTSLEVGTPQGSVISPVLANVYLHYAQDLWAHQWRKRHADGDVIIVRYADDSVVGFQYRKDADRFLKDLIERMGQFGLELHPVKTRLIEFGRFAVVNRRKRGERKPETFDFLGFTH

SEQ ID NO: 605 - protein, 271 aa, Azotobacter vinelandii
GVDGMSWREYEEDLHQRVGKLHARLHRGAYRATPSRRVYIPKADGRQRPLGIASLEDKIVQQAVVTVLNAIYEEDFQGFSYGFRPGRSQHDALDALTVALKSQKVNWILDADITSFFDEIDHEWMLMFLGHRIADRRMLGLICKWLQAGVMEDGRRLAATKGTPQGAVISPLLANIYLHYVLDLWARQWRQRHARGEMIVVRYADDSVVGFRTQWQAQRFLVQLQERMARFGLSLNASKTRLIEFGRFAVQNRRRQGLGKPETFDFLGFTH

SEQ ID NO: 606 - protein, 271 aa, Bradyrhizobium japonicum
GVDGMTWQDYEEDLEPRLADLHKRVQRGTYRPQPSRRTYIPKADGKQRPLAIAALEDKIVQGATVIVLNAIYEGDFCGFSYGFRPGRGPHDALDALCTAIETRQVNWIIDADIQNFFGAVSQPWLVRFLEHRIGDKRIIRLIQKWLKAGILEDGVVTADDRGTGQGPVISPLLGNIYLHYALDLWAKRWRQREVSGGMIIVRYADDVVVGFEREDDARRFLDAMRARLEEFELTLHPAKTRLIEFGRHAAAQRKQRGLGKPETFAFMGFTF

SEQ ID NO: 607 - protein, 271 aa, Burkholderia cenocepacia
GVDGVTWHDYEQDLDRNLEDLHGRLRRQAYRALPSRRRYIPKADGKQRPLGIAALEDKIVQRALVAVLNAVYEMDFLGFSYGFRPQRSQHDALDALATGIARTSVSWILDADISRFFDTVDHDWLIRFVEHRIGDQRVIRLIRKWLKAGAMEDGVIEPTDEGTPQGSVISPLLANIYLHYVFDLWANQWRKRHAEGNVVIVRYADDVVVGFDKPHDAKRFRRAMQQRLEQFGLSVHPEKTRLIEFGRFAARNRASRGLGKPETFNFLGFTH

SEQ ID NO: 608 - protein, 271 aa, Serratia marcescens
GVDGIRWMDYAGNMKNNITDLHRRLHQGSYRAQPGRRHYIPKADGKQRPLGIASLEDKIVQYALVKILNAVYENDFMGFSYGFRPGRSQHDALDALATGLVRTNVNWVLDADISQFFDRVSHEWLIRFTEHRIGDRRVIRLIRKWLTAGTSEEGQWRATEEGTPQGAVISPLLANIYLHYVFDLWAHQWRRRYATGNVVMVRYADDIVIGFDKRYDARRFRIAMQRRLREFGLTVHPEKTRLMEFGRFAAENRAIRGKGKPETFNFLGFTH

SEQ ID NO: 609 - protein, 271 aa, Chlorobium phaeobacteroides
GVDGITWKDYGEGLEENLADLHRRIHTGAYRAQPSRRKYIPKANGQQRPLGIAALEDKIVQRAVVAILTPIYEAEFLGFSYGFRPGRSQHDALDALAYGIKVKKIGWVLDADISRFFDTISHEWMIRFLEHRIGDKRIVRLIIKWLKAGVLEDSVRIEAEEGTPQGAVISPLLANIYLHYAYDLWAKQWREKHCKGDMIVVRFADDSVAGFQNKEDGERFLADLKERLAKFALTLHPEKTRLIEFGRYAAKNRQRRGQGRPETFDFLGFTH

SEQ ID NO: 610 - protein, 271 aa, Stigmatella aurantiaca
GVDGVTWEQYAGNLEANVRDLHTRLHRGAYRARPSRRAYIPKADGRQRPLGIAALEDKLVQRAVVEVLNAVYETDFLGFSYGFRPGRSQHQALDALSAGIYLKKVNWVLDADIRGFFDAIDHGWMQKFLEHRIEDTRLLRLVQKWLAAGVMEDGKWTQSKEGTPQGATVSPLLANLYLHYVFDLWSQRWRKRVARGEVIIVRYADDFVVGFQHRSDAERFWRELRERLRSFALELHPEKTRLIEFGLYVAERRRERDQGRPETFNFLGFTH

SEQ ID NO: 611 - protein, 271 aa, Frankia sp.
GVDGVTWTDYGQDLEANLQDLHVRVQSGCYRATPSRRAYIPKADGRLRPLGIASLEDKIVQRAVVEVLGAVYEVDFRGFSYGFRPGRGPHDALDALAVGIWRKRVNWVLDADIRDFFGQIDHSWLRRFLEHRIADKRVLRLIDKWLAAGVVEDGEWTACEEGSPQGASVSPLLANVYLHYVLDLWVDWWRRRHARGDVIVVRWADDFIVGFEYEEDARRFLDELRERFAKFGLELHPDKTRLIEFGRYAARDRKRRGLGKPETFDFLGFTH

SEQ ID NO: 612 - protein, 272 aa, Coprococcus catus
GVDEITKKEYERNLEQNIDDLVERLKRKSYKPQPSIRVYIPKSNGKLRPLGIACYEDKIVQLALKKILEAIYEPRFLNCMYGFRPNRGCHNAIKELYKRLNNTKICYIVDADIKGFFDHMKHEWIIKFLKLYIKDPNIIGLVKKYLKVGVMDNGELMVNEEGSAQGNIISPILANIYMHNVLTLWYKFIITKECKGDNFLIAYADDFVAGFQCKWEAENYYKLLKERMEKFGLQLEDSKSRLLQSGAYIARAKQKSGECIRLQTFDFLGFTF

SEQ ID NO: 613 - protein, 271 aa, Clostridium botulinum
GIDRVTKVEYGANLEENISGLVIRLKNKSYKPLPVLRVFISKGNGKMRPLGIAAYEDKFVQLAIKKILEAIYEPRFLENMYGFRPRRGCHNAIKAAYDRIYENKINYIVDADIKGFFDNMSHEWIMKFLGVYISDPNFLWLINKYLKAGVMTDGTLIDSISGSAQGSIISPVIANVYMHNVLMLWYKFIVLNGIKGKSFLVTYADDFIAGFQYKWEAEKYYIELKRRMAKFNLELEDSKSRLLEFGRFAEGNRKARGEGKPETFDFLGFTF

SEQ ID NO: 614 - protein, 264 aa, Pseudoalteromonas tunicata
GIDGITMPAYQQQLVGNITRLSDALKHKRFRANDIKRVFIPKANGKQRPLGLPTVDDKLVQQGVSQILQSIWEADFLPNSYGYRPNKSAHQALHSLALNLQFKGYGYIVEADIKGFFNNLDHNWLMKMLKQRIDDKAMLSLISQWLKARIKSPEGVFEYPKSGTPQGGIISPVLANIYLHYALDLWFEKKVKPRMRGRAMLIRYADDFVCAFQYANDAERFYEVLPKRLKKFNLEVAEEKTSLLRFSRFHPSRKRQFVFLGFAF

SEQ ID NO: 615 - protein, 264 aa, Dehalobacter sp.
GVDKVTAKEFAEELKQNIENLAEHLEKKRYRAKLLRRVDIPKGEGKTRPLGIPAIADKLVQSAAAKILEAIYEQDFLASSYGYRPKVSAHTAIKDLSKELNYGDYSYIVEADIKGFFQNIDHAWLIRMLEQRIDDKAFVGLIKKWLKAGILKQDGEVEHPITGSPQGGIISPILANTYLHYVLDLWFEKIVKPNCEGEAYLCRYCDDFVCAFQYKGDADKFYRSLPKRLEKFGLELAVDKTQIIQFNRWLRKQSSSFEYLGFEF

SEQ ID NO: 616 - protein, 243 aa, Thioalkalivibrio nitratireducens
MERLKTKRYRTKLVRRCYIPKENGQERALGIPALEDKLVQLACAKLLTAIYEQDFLPVSYGYRPGRDAKEAVGDLGFNLQYGRFGHVVEADIQGFFDHLDHDWLLRMLALRIDDRAFLHLIRKWLKAGILDTDGQVLHPDAGTPQGGIVSPILANVYLHYALDLWFERVVRPRCRGQALLIRYADDYVCAFQYREEAEGFYRVLPKRLAKFGLAVAPEKTRILRFSRFHPGLPRRFAFLGFEL

SEQ ID NO: 617 - protein, 253 aa, unidentified
  source 1..253: note = Wolbachiaendosymbiont of Culex quinquefasciatus Pel
GIDWVTVEAYGENLKERLEGLVDSMKGKQYQPQPVRRVYIPKAGSKEKRGLGIPSTEDKLVQIMLKKILENIYEANFLDSSYGFRPGRNCHQTVNALDKAVMYKPINYIVEVDIKKFYDNIQHKWLMRCLRERITDPNLLWLIKRFLKAGIVEAGYYEATKQGTPQGGIVSPVLANIYLHYVLDLWLEKKFKPRSRGYIQLIRFCDDFVVCCESKVDAEEFLELLKQRLNKFGLEVSENKTRVVKFGKREWQQ

SEQ ID NO: 618 - protein, 271 aa, Thioflavicoccus mobilis
GIDGISKEQYGANLDENIKELSSRLRNMGYRPQPKRRTYIPKPGSVKGRPLAISCFEDKLVELAIKRVLEPIYEVQFEDSSYGYRPGRSQHQCLDDLGRTIQQSRINTIVEADIRSFFNTVDHAWMLKFLGHRIGDPRIIRLIGCLLKGGILEDGLVQASEEGTPQGSILSPLLSNIYLHYVLDLWFSRRVRPQCRGEAYYFRFADDFVAGFQYRQEAEQFQTALGERLGQFKLRLAEEKTRCLAFGRFARSNAQKQGQKPGEFTFLGFTH

SEQ ID NO: 619 - protein, 270 aa, unidentified
  source 1..270: note = uncultured archaeon
GIDGVTVGEYAKALDENIADLVARLKAKQYKPQPVLRVYIPKPNGEKRPLGIPAVEDKIVQMALKKILEAIFEQDFIDTSYGFRPNRSCHDALTELDRIIMNVPVNFVVDMDISKFFDTVDHKRLMECLRQRIVDPTLLQLIGRFLKSGIMEEGKYSEMDQGTPQGGVLSPVLANVYLHYVLDKWFENEVLPQLTGFAQLIRYADDFVVCFEKETEARAFGVALRRRMGKFGLTISEEKSKIIEFGRCTCTRAKRYGRKCETFDFLGFTH

SEQ ID NO: 620 - protein, 270 aa, unidentified
  source 1..270: note = uncultured archaeon
GVDGVTWRKYEENLDENTEDLVTRLIAKQYRPQPVKRAYIPKSNGERRPLGIPALEDKIVQLAIKKILEAIFEEDFCDVSYGFRPNRSCHDALDMVDMIIMTKPVSYVVDMDIAKFFDTVDHECLMECLKQRVVDPSLLRIIARCLKSGVMEEGKYLETDKGTPQGGILSPILANIYLHYALDLWFEKEVKEQLKGFAQLIRYADDFIVCFQHDDEARAFGKTLRERLAKFGLTISEEKSRIIKFGRYACQQARKQSKKCATFDFLGFTL

SEQ ID NO: 621 - protein, 271 aa, Clostridium  beijerinckii
GIDDVTKQEYSKELDNNIENLIVKLRNHSYKPQAVKRVYIPKGDGKTRPLGIPSYEDKLVQMALNKILQSIYEAEFKDFSYGFRPKRNCHSAIKALNKVIENGRINYVVDADIKGFFNNVNHEWMIKFLEVRIGDPNIISLVKKFLKAGLMDNGIIKTTEIGTPQGSIVSPTLANIYLHYSLDLWFEKVIKRNFRGQSEITRYADDFVCCFQYESEARQFCRLLVSRLNKFNLEVERTKSKLILFGRFAEEIRKSRGFKNAETFDFLGFTH

SEQ ID NO: 622 - protein, 269 aa, Thermoanaerobacter sp.
GVDKVTWEEYDVNVDENVETLIAKMKRFSYRPQPARRVYIPKANGKLRPLGIPCYEDKLVAAVMADILNEVYENIFLDTSYGFRPGRSCHDAIKELNRIIGRCKISYVLEADIKGFFDNVDQKQLMEFIAHDIDDKNFSRYIVRFLKSGIMEEGKYHESDKGTAQGSPLSPILANIYLHYTLDVWFAYLKRNGKFRGEAYIVRYADDFVMLFQYKSDADKMYEALPKRMAKFGLELAMDKTKILPFGRFAKQNSKDGKTETFDFLGFTF

SEQ ID NO: 623 - protein, 272 aa, Dehalobacter sp.
GIDGETKASYGGNLEENLRNLLEQLKEGSYRPTPVRRKFIPKAGSNKLRPLGIPVLEDKLVQNALVIILESIYEQDFLEDSYGFRPGRSQHDALKDLSRKIGTRKVGYIVDADIRGYFDHVDHEWLLKMLQERISDSKILKLIKRFLKAGVMEEGKLSKTEEGVPQGGSLSPLLGNIYLHYVLDLWFNKIITKQCQGEAYLTRFADDTVACFQYQKDAERFYEALKKRLKKFNLEIAEEKTRIIEFGRYAQRDVQRRGGRKPETFDFLGITH

SEQ ID NO: 624 - protein, 276 aa, Clostridium beijerinckii
GVDKVTKEEYETNLENNIDNLLIRMKTFKYRPQPVRRVYIDKSGSNKKRPLGIPAYEDKVVQLAINKILKSIYEQDFIDSSFGFRQNRSCHDALKILNVYLSEKNVNYVVDADIKGFFDNVDHKWLMKFLEHRIADKNLLRYIGRFLKTGIMENGKFYKVYEGTPQGGIISPTLANIYLHYVLDIWFNNFIKKKCKGQAYIVRYADDFVCCFQYEDEAKAFYEALKNRLDKFNLQVAEDKTKILYFGKNAYYDRKFKRAKLESYKDRTFDFLGFTH

SEQ ID NO: 625 - protein, 272 aa, Moorella thermoacetica
GIDGITKEQYGDNLEANIQSLLERLKRKAYRPQPVRRVYIPKPGSDKKRPLGIPAYEDKIVQLAASKILNAIYEAEFLDMSFGFRPQRGCHDALKLLNYLIVARKVNYIVDADIKGFFDHVNHDWLMKFLGHRIADPNFLRFIRRFLKAGIMENGELRDATEGTPQGGIVSPILANIYLHYVLDLWFEKAVRKHCRGEAYMVRYADDFICCFQYKHEAEAFYRALKARLAKFSLSVAEEKTKIIPFGRFATQWCKRMGQNKPDTFDFLGFTH

SEQ ID NO: 626 - protein, 272 aa, Syntrophomonas wolfei
GVDQVTKQAYEENLEANIADLIGRMKRQAYKPQPVRRVYIPKEGSNKRRPLGIPSYEDKLVQKGLARILNTIYEQDFLDCSFGFRPGRGCHDALKVLNHIIERKKVNYIVDADIRGFFDHVDHEWMMKFLELRIADPNLLRLIKRFLKAGVMEAGIVYDTPKGTPQGGIVSPILANIYLHYVLDLWFEKVVKKRCQGEAYLVRYADDFVCCFQNKSDAEWFYANLRERLNKFNLEVAEEKTRIIAFGRFADKESKKQGRKKPDTFDFLGFTH

SEQ ID NO: 627 - protein, 215 aa, Desulfotomaculum carboxydivorans
MRRQYIPKKNGKLRPLGIPNIEDRIVQQAIVNVLSPKCEEHIFHKWSCGYRPNLGIKRVMQIILWNIETGYNHIYDCDIKGFFDNIPHKKLMKVLTKYIADGTVLDMIWAWLKAGYMEEGKFHPTDSGTPQGGVISPLLANLYLNELDWTLEEHGVRFVRYADDFLLFAKSKEDIERAAEVAKTTLDELGLEVSIEKTRFVDFDKDDFNFVGFSF

SEQ ID NO: 628 - protein, 323 aa, Shimwellia  blattae
GINNNTMDEMSVGRIINLIQLINSGSYKPRPCRRTHIPKDARKPNGKKRPLGIPTGDDKLIQEVMRMLLEEIYEPVFSDWNYGFRPKRSCHSALKEIRNSWKGTKWVCDVDIKGYFDNIDHDLLLKFLSKRIADNKFLALLKKFLKAGYLDNWRYFGTHSGTPQGGIISPILANVFLHKLDEFMKNRISEFGKGGRRKPNPIYKRALQNRANRIKWIRQGFGASGMPADEQKIQKWRHEADELEKKLRTLSSVIMDDSEFKRMRYVRYADDFLIGVTGSKNEAKKIMKEVVDFVETELHLEISKEKSGIIDPKKGFTFLGYEI

SEQ ID NO: 629 - protein, 317 aa, Novosphingobium  aromaticivorans
GVDGQTFDGFSPDKVRSIIERLANGTYRPQPARRVYIPKANGQKRPLGVPTTEDKLVQEVVRTILEQIYEPLFSRHSHGFRPKRSCHTALESIRAIWTGVKWLIDVDVVGFFDNIDHDVLVSLLEKRIADRRFVRLIRGLLKAGYVEDWVFHKTYSGTPQGGVVSPMLANIYLHELDMFMQAKMAGFDKGKQRSPSPDARRIRNRLSYVRRTVDQLRAKGRGDDPRVTSFLEEIGRLKAERLAVPASDAFDPNYRRLRYCRYADDFIIGVTGSKSEARQIMEEVRTYLSDHLKLAVSAEKSGIHKASDGARFLGYEV

SEQ ID NO: 630 - protein, 317 aa, Novosphingobium aromaticivorans
GIDGKTFEDFGPDRLAPLIASVATGAYKPKPVRRVFIPKGKGKRRPLGIPTRDDRLVQEVARQLLERIYEPVFSKASHGFRPGRSCHTALEHVKAVWTGVKWLVDVDVAGFFENIDHDILLKLLRKRIDDERFIDLIRDMLKAGVMEGRAHTQTYSGTPQGGIVSPILANIYLHELDEFMAGRITAFEKGKTRATNPEYRRLAGRIAKRRERLKRLEASDNADQVTVKAILAEINTLSKQMRSLPSRDAMDAGFRRLRYCRYADDFLIGVIGSKDDARGVFAEVRTFLTEVLALTVSEEKSGIRKASDGTKFLGYEV

SEQ ID NO: 631 - protein, 318 aa, Bacillus cereus
GTINNTVDGFSKNRVSKIINNIKNGNYKPTPVKRVYIDKKGSKKKRPLGIPTFDDKLVQLVIKYILEAIYEPNFSENSHGFRKNRGCHTALKQIKKSGSGTKWFIEGDIQGFFDNIDHHILINLLRKRINDETLIGLIWKFLRAGYMEDWQFHKTFSGTPQGGILSPLLANIYLNELDIYMEKYAERFGKGQPKDREVDKRYQYLHLKIKRGRKKADLLREQGKLNESQELIHQVNEWIKERGQRPYYNPMSDKFKSLKYVRYADDFIVMLIGSKDDANAIKSDIAQFLNEELKLTLSEEKTLITHSSKKAKFLGYNV

SEQ ID NO: 632 - protein, 303 aa, Herpetosiphon aurantiacus
GSTDETIDGMSMAKIHRIIADLRRETYRWTPVRRVYIPKATGKTRPLGVPTWSDKLVQEVLRSILDAYYDPQMSDHSHGFRPNRGCHTALKAIQRCWTGTRWFIEGDIAQYFDTINHTTLLTILAKRIHDGRFLRLIQTLLQAGYLHDWVYHPTLSGTPQGGVISPLLANIYLHEFDQFVEHTLIPAYTKGQRRKVNPAYAQMEQRISKLRRQREYASVTPLLKELRTLPSRDVHDPDYRRLRYVRYADDFLLGFAGTKVEAEAIKQQINVWLYDHLQLKLSTQKTLITHASSDPAHFLGYDI

SEQ ID NO: 633 - protein, 302 aa, Streptococcus anginosus
GVTEETIDGMSIQKIDMIIEQLRQETYYWRPARREYIPKKNGKHRPLGIPVWSDKLLQEVIRMILEAYYEPQFSEHSHGFRPKRGCHTALQEIQTWQGTHWFIEGDISSYFDTIDHCVLITMLSKQIQDGRFIRLIKNMLEAGYLDDWKFRKTISGTPQGGVISPLLANIYLHQFDKWVGEELIPQYTRGKKQKANSAYNRLSRKIKFYQDKGEYKKAHQIIVERRNIPSVDTYDTNYRRLRYVRYADDFILGFTGSKAEAKDIKKQIGDFLNIKLHLELSQEKTLITHATEESAKFLGYEI

SEQ ID NO: 634 - protein, 302 aa, Syntrophobotulus glycolicus
GVDNRTIDGFKYEMIDTLIEKLKTEQYYPKPVRRTYIPKKNGKTRPLGIPCFEDKLLQEVIRQLLESIYEPIFSDNSHGFRPDRSCHTALCQIKNTMRGANWVIEGDITGCFDNIDHTILLNILSQKIEDGRFIELIRRFLKAGYLEFKQMHRSLSGCPQGGIISPILSNIYLNEFDRYMDEIINKNTKGKKRRSNPEYQRLRGKRYTAIKKGNLEEIKRLTKEIQSIPSLDPMDSNFTRVKYVRYADDFVIEVIGSKEMAESIKEDVATFLKEKLNLELNQEKTLITNLGNEKANFLGYEF

SEQ ID NO: 635 - protein, 315 aa, Bacillus cereus
GTDKETIDGFSMDWIENIISSLKDESYKPNPSRRVYIPKKDDKQRPLGIPSIKDKIIQEVVKEILVSMYEPIFSKASHGFRPNKSCHSALNDIKMTFGGIKWWIEGDIKGFFDNIDHHVLIGILRKRIKDEKFIKLIWKFLKAGYMEDWKFNKTFSGTPQGGIISPVLANIYLHELDAFMEKQIIKFDEGKRRRDNPVYKKYNTAIWYRKNKLKEKWNTLNDDERKELQSEISTLEKEREKHSAVDNMDASFKRLKYVRYADDFVVGVIGSKEDSKRIKEEITEFLHTSLKLELSQEKTLITSNKNLIKFLGYEI

SEQ ID NO: 636 - protein, 316 aa, Bacillus thuringiensis
GVDQRSIDGFSMKEVEDLISVLKSKSYQPYPSRRTYIEKKNGKKRPLGIPSFYDKLVQEVIRMILEAIYDSSFSSSSHGYRKGKGCHSALLEIKRTFTGSKWFIEGDIKGFFDNIEHHTLVTILKRRIKDEAFIELIWKFLRAGYLEEWKFHNTYSGAPQGGIISPIISYIYLNELDTYMKKYQDRFESGKKRQINKEYSNLQYKVRKIQEKIDTAYLNGEVTRITELKEQQKVLKGKLLQTPYNNPMDENYRRLKYVRYADDFLIGVIGSKEDAILIKNEIASFLKEEIKLELSMEKTLITNAFKKHAKFLGFEI

SEQ ID NO: 637 - protein, 312 aa, Streptococcus pyogenes
GVDNQTISAMSLERINKIIDSLKDESYSPTPTKRVYIPKKNGKLRPLGIPSIGDKLVQEVCRMLLNSIYDESFEDTSHGFRDNRSCHTALRQIQNRFVRCKWFVEGDIKGFFDNIDHNIMIDILSKRIDDERFLRLIRKFLKSGYMEQNQYHNTYSGMPQGSIISPILSNIYLDKFDKYMQNYKESFDKGNKRKQNKEYKALYDRRKRLENKLSKTTNKTEIDDIKSEIEEINKRYFNIPCLNPMDENFKRIQYVRYADDFIIGIIGSKADAEMVKQDIGQFIKSELNLELSDEKTLVTKSTDRAKFLGFDI

SEQ ID NO: 638 - protein, 315 aa, unidentified
  source 1..315: note = Clostridium cf.saccharolyticum
GTDGKTIDGMGMARINALIEKMRNSSYQPNPARRTYIPKSNGKMRPLGIPSFDDKLIQEVVRLILESIYEPTFSDHSHGFRMNKSCHTALKYVQKYFTGTKWFVEGDIKGCFDNVDHHVLIAILRKRIADEQFIGLLWKFLKAGYMEDWNYHNTYSGTPQGSIISPILANIYLNELDHFMAEYAEKFNCGDRRRINPAFKKKLDVCRGKEERLKRNISKMSEEEKEGLLAEISELRRSLRSMPYSDQMDEGYKRVFYIRYADDFLIGVIGRKADAEQVKQDVGHFIRENLHLEMSEEKTLITHGHDFAKFLGYEV

SEQ ID NO: 639 - protein, 312 aa, Odoribacter splanchnicus
GTDGKTEDEMSIDRINKLIESIKDETYSPNPAKRIYIPKKNGKMRPLGIPSFEDKLVQEAVRMVLEAIYEGHFEWTSHGFRPNRSCHTALKSLQNNFNGAKWFIEGDIKGFFDNIDHDVLIEIMKGRIADDRFLRLIRKFLNAGYMEEWQFNKTYSGTPQGGIISPVLANIYLDKFDKYMNEYANKFNKGTVRSRNKDICKLNSRVHYLKRRINEVEDVNVRTRMVEELHEKQKRILTMPSGNDMDRNFRRLRYLRYADDFLIGVIGTKNECETIKADITKFMQEKLRLEMSQEKTLITNAQDSAKFLGYEI

SEQ ID NO: 640 - protein, 312 aa, Bacteroides fragilis
GTDGQTISGMSIKRIQSIIDKLRDESYQPHPAKRIYIPKKNGKQRPLGIPSFEDKLVQKVIQMILESIYEGSFEKCSHGFRPHRNCHTAMASIMEGFDGTRWFIEGDIKGFFDNIDHDIMITILSERIADERFLRLIRKFLNAGYLEKWKFHKTFSGTPQGGIISPILANIYLDQLDKYVVEYISQFNRGKMRKRNPEYKRIASRKDKRVKKLKTETDEQKRAALRSEIVELHREMQKHPATLDMDEDFRRMRYVRYADDFLIGIIGSKDDCVNIKADIKRFLCEKLKLELSDEKTLITHGHDHAKFLGFEV

SEQ ID NO: 641 - protein, 312 aa, Streptococcus pneumoniae
GVDELTIDGMSIARIDQLIDSLKDESYQPHPSRRTYIPKKNGKLRPLGIPSFDDKLLQQVIKMILEAIYEGQFEPSSHGFRPNKSCHTALTQIQKTYTGTKWFIEGDIKSFFDNINHDVMIHILRERITDERFLRLIRKFLNAGYVEDWKFYKTYSGTPQGGIISPILANIYLDKFDKYMTDYVKNFCQGKYRKRTPEYRQNEIALGKARRALECVSTENQRQEVIQRIRQLEKERVLIPHSDPMDSSFKRLTYTRYADDFICGVIGSKEDAHRIKADIKDYLEAVLKLELSVEKTLITNARDKAKFLGYHL

SEQ ID NO: 642 - protein, 312 aa, Bacteroides thetaiotaomicron
GADGKTIDGMSIDRVEQLIGSLKNETYQPNPSKRTYIPKKNGKKRPLGIPSFDDKLVQEVVRMILEAIYEGSFEHTSHGFRPKRSCHTALIDIQKTFTAVKWFIEGDIKGFFDNINHDVLINILRERIADERFLRLIRKFLNAGYVEDWVFHRTYSGTPQGGIISPILANIYLDKFDKYIKEYINRFNKGVTRKGDARYKLYEQRRYRLAKKLKNEKDVKVRKQMTAEIKRLREERNNYPARNEMDSSIKRLKYVRYADDFLIGITGNLEDCKTVKEDIKNYLNEALKLELSDEKTLITNAQKPAKFLGYDV

SEQ ID NO: 643 - protein, 312 aa, Alistipes finegoldii
GSDGKTIDGMSLKRIENLIDALKDESYQPKPARRTYIPKKNGNMRPLGIPSIDDKLVQEVLRMLLEAIYEGSFENTSHGFRPKRSCHTALIQVQKNFTAAKWFIEGDIEGFFDNINHDVLIGILKERIADDRFIRLMWKFLKAGYIEDWTFHRTYSGTPQGGIISPILANIYLDKLDKYMKEYACQFDRGDRRAMNLEYKRYSRKIWWLGTKLKQTKDKDTRKELIDAIKQHQKNRMHLPSVDEMDEGYRRIKYVRYADDFIIGVIGSKSDCEAIKEDIKNFLGEKLKLTLSEEKTLITHGNRKAKFLGYEI

SEQ ID NO: 644 - protein, 312 aa, Alistipes finegoldii
GSDGRSIDEMSLARIETLIASLKDESYQPHPSRRVHIPKKNGKTRPLGIPAFEDKLVQEVVRMILEAIYEGHFETTSHGFRPKRSCHTALLHIQKTFSGAKWFIEGDIKGFFDNIDHDVLVGILRERISDDRFIRLIRKFLKAGYVEDWTFHNTYSGMPQGGIVSPILANIYLDKLDKYVKEYIRHFDMGTKRRPGKESNDLANERKRTVRKLKKVKDGTEKAALVARLKAIEQERAAFPSGDEMDGSYRRLKYIRYADDFILGVIGSKEDALRIKEDIKSFLSESLALELSEEKTLITHTGKSAKFLGYEI

SEQ ID NO: 645 - protein, 293 aa, Streptococcus equi
GTDGKTIVEIQKLPIEMVIKTIRNKLNYYQPKNVRRVEIPKDNGKTRPLGIPSIWDRLIQQCVLQVLEPICEAKFHERNNGFRPYRSTQNAIAQCYKMAQIQNLHFVVDVDITGFFDNIDHSKLIRQLWGLGVQDRKLIMIIKQMLKADILFKDIVITPETGTPQGGILSPLLANVVLNELDWWVANQWEMFKIKEGSTGYEFTKVDNEGNILTIDRTQKWNKLRAKTGLKEMYITRYADDFKIFCRDYATAVKVMKATNLWLAENLHLQTSDEKSGITNLRKNYTTFLGIKF

SEQ ID NO: 646 - protein, 290 aa, Enterococcus faecium
GTDGTIIKDIGKLPAETVVKKVRYIVAGSPHGYRPKPVRRKEIPKPNGKTRPLGIPCMWDRLIQQCIKQVLEPICEAKFSENSYGFRPNRSVENAIKATYNRLQISQLHYVIEFDIKGFFDNVNHSKLIKQIWAMGIRDKHLIFILKRILKAPIKMTNGTITYPEKGTPQGGIISPLLANIVLNELDHWVESQWQENPVTKNYVVHINKSGSPCKSNAYKEMKKTKLKEMYMVRYADDFRVFCRYKESAEKAKIAITQWIEQRLKLEVSQEKTRIVNVRKRYSDFLGFKI

SEQ ID NO: 647 - protein, 290 aa, Eubacterium siraeum
GTDKLKISDIGKLTADEVTARVRRIVKGGKNGYTPRSVRRKEIPKPNGSTRPLGIPCIWDRLVQQCIKQVMEPICEARFSNNSYGFRPNRSVENAIAAIYRLMQRSGLYYVVEFDIKGFFDNVDHSKLIKQLWSLNIRDKELLYVIRRILKAPILMPDGHIEHPAKGTPQGGIISPLLANVVLNELDHWIESQWQCNPVTENYSYRENATGCPIQSHAYRAMRNTRLKEMYIVRYADDFRILCRTKEQADRTLIAVTHWLKERLRLDVSPEKTRVVDTRRSYSEFLGFKI

SEQ ID NO: 648 - protein, 285 aa, Bacillus anthracis
ACDNVNIKNIEGMEQSYFLNEVKRRFQNYQPQKVRRKEISKPNGQTRPLGIPAMWDRIIQQCILQVMEPICEAHFSNRSYGFRPNRSAEHALADASVRVNKQNLTYVVDVDIKGFFDEVNHVKLMRQLWTLGIRDKQLLVIIRKILKAPVQMPDGTTMFPTKGTPQGGILSPILANVNLNEFDWWISRQWETFKAKKVKPRCMRGIWCNDVVTTQLTKTSKMKPMYIVRYADDFKIFTNTRSNAEKIFKATQMWLEERLKLSISAEKSKVTNLTKQQSEFLGFTL

SEQ ID NO: 649 - protein, 286 aa, Enterococcus faecium
GIDGKTIKDIEKLTTERYLDIVKKRFKFYKPRKVKRTEIPKPNGKTRPLGIPSIWDRVAQQCILQVLEPICEAKFNPHSHGFRPNRSAEHAIADCAKKMNIIKMGYCVDIDIQGFFDEVWHSKLMRQMWTMGIRDKELLTIIRKMLKAPVVLPNGTIQFPEKGTPQGGILSPLLANINLSEFDWWVSEQWETRHMSEIKTQYNANGTEHMGNHHRKMRSHTKLKEFYIVRYADDFKLFCHNRKTAELLYHASIQWLEQRLHLPVSIEKSKITNLRKESSEFLGFNL

SEQ ID NO: 650 - protein, 287 aa, Carnobacterium sp.
GVDDITIKDIENLEQTIFVEMVRKRFSNYSPRKVRRVEIPKPNGKTRPLGIPSIWDRIAQQCILQVIEPICEAKFNKHSYGFRPNRSTEHAIADMLFRINQQKLHYVVDVDLQGFFDEINHKKLMNQVWTLGIHDKQLLVIIRKMLSAPIVLKNGSIMHPVKGTPQGGILSPLLANISLNEFDWWISNQWETFETRKKYAAAVMGNGTKNRGLTYRMLRKNSKLKEIYIVRYADDFKLITSNRRDAEKIFIASQMWLKERLGLPISKEKSKITNLRKEESEFLGFTI

SEQ ID NO: 651 - protein, 286 aa, Bacillus cereus
GIDGVTIKDVEKLSQEDFIKIVQKRFSNYTPRKVRRVEIPKPNGKTRPLGIPSMWDRIAQQCIKQVLEPICEAKFNKHSHGFRPNRSPETAMADATLRVNRSHMQYVVNVDIQGFFDEVNHKKLMRQLWTMGIRDKQLLVIIRKMLKAPIVLPNGEMQYPNKGTPQGGILSPLLANINLNEFDWWITNQWEDRLLKELSLTIKKGGHVDKYPHYSKMRKTTALKEMYIVRYADDFKIFTATKSNAQKIFKACEMWLQERLKLPISKEKSKITNLRKESSEFLGFEI

SEQ ID NO: 652 - protein, 272 aa, Enterococcus sp.
GVDGITISDIERLNENDFVEIIRANLSNYRPGPVRRVYIPKKNGKKRPLGIPNLYDRIIQQTIKQVIEPIVEAKFFKHSYGFRPLRSVEQAMGRMHSVINNVQLHYVVDVDIKGFFDNVNHNLLRHQIWNMGIRDTKLIAIISKILRAEIVGEGTPVKGTPQGGVLSPLLANIVLNDLDQWIASQWENFPSKHRYSRGKLHRALKGTTLKEGYLVRYADDFKLLTRSYSMAKRWYTAIRGYIEKHLKLEISPEKSGITNLRKKRTEFLGFEI

SEQ ID NO: 653 - protein, 273 aa, Halobacillus halophilus
GTDGKTIDDMKELSENDLVNEVRSKLQNYHPKKVRREWIEKENGKWRPLGIPCILDRVIQQCFKQVLEPIVESQFFKHSYGFRPLRSAHHAMARIQFLINHSQLHYVVDVDIKSFFDNVNHRLLKKQLWNIGIQDRKVLACISKMITSEIDGEGVPDKGSPQGGILSPLLSNVVLNDLDQWVADQWEVFPLTKSYSSDDARRRARKQTNLKQGYLVRYADDFKILCRDGKTAQRWYHAVRLYLKERLKLDISPEKSQIVNLRKRESEFLGFTI

SEQ ID NO: 654 - protein, 273 aa, Enterococcus faecalis
GTDSFTIDNYKEMNQAEFIHLILSQLENYKSKSIKRVMIPKPNGEKRPLGIPCMIDRIIQQMFKQVLEPICEAKFYEHSYGFRPLRSAKHALGRIMYLINISKMHYAVDIDIKGFFDNVNHRLLIKQLWNIGICDKRVLAILSKSLKSPIQGEGISSKGTIQGGIISPLLSNVVLNDLDHWVSKQWHTFETKYPYTKGYNKFRALRDTNLKQGYIVRYADDFKIMTNDYPSALKWFHAVKLYLKDRLKLDISNEKSKIVNLRKRKSEFLGFTI

SEQ ID NO: 655 - protein, 273 aa, Bacillus thuringiensis
GIDSFAIDQYKSMDKAEFLNLVRNRLNQYKPKAVKRVFIPKPNGDKRPLGIPTMFDRLIQQMIKQILEPICEAKFYEHSYGFRPLRGARHAISRVMYLISRNTFHYAVEIDIKGFFDNVNHTLLLKQLWNMGIKDKRVLKLIYLILKAPIKGVGIPRKGTPQGGILSPLLSNVVLNDLDQWIARQWHHFQSDYDYTEPGNRSRALKRTKLKQGYIVRYADDFKIMAKDFRTAQKWFMATKLYLKERLKLDISPGKSRIINLRKNKSEFLGYSL

SEQ ID NO: 656 - protein, 273 aa, Bacillus cereus
GTNGHTIKHLNKIDADKLIRLTQKRLENYMPHAVRRLFISKPNGKMRPLGIPTIEDRLIQQMFQQVLEPIVEGKFHPQSYGFRPKRGTHDALARCYHMVNHSHQHFVVDIDIKGFFDNVNHKKLMRQLWTIGIRDKKVLSIIKKMLKAEVTGEGIPVKGTPQGGILSPLLANVVLNELDWWVSNQWETKPTRVPYKLKRNKTDALKKTRLKPMYLVRYADDFKIFTNSYDNARKIKIAVEKWLKERLGLEISEEKSKITNLRKNGTDFLGIRF

SEQ ID NO: 657 - protein, 274 aa, Dehalobacter sp.
GTDGLTIKDIAGMTNQEVITMVKRRLKNFTPQSVRRVEILKDNGQNRPLGIPTMSDRLIQACIYQILEPICEARFHNHSYGFRPTRRTEHALATMHRMINIQHLHFVVDVDIKGFFDNVDHGKLLKQMWTMGIQDKNLLCIISAMLKAEIEGIGIPNKGVPQGGLCSPLFSNVVLNELDWWISDQWESYETSYPYKRNEGKIRAIRRGSKLKECYIIRYCDDFKIMCPTRDVAERMFVAVKLWLKERLNLEISSEKSKITNLRKKSSEFLGFKI

SEQ ID NO: 658 - protein, 273 aa, Clostridium difficile
GTNKRTIIDVGEENPYQLVQYVQNRFNNFQPHSIRRVEIPKPNGKTRPLGIPTIEDRLVQQCIKQILEPILEAKFHKHSYGFRPERSSHHAIAIFQQWTFKGFHYVVDIDIKGFFDNVNHGKLVKQLWTMKIRDKTFISILSRMLKAEVKGIGKSTKGTPQGGILSPLLANVVLNELDWWIDSQWDGFPTKRKYSSLLSKTQSIRKYSNLKEIKIVRYADDFKIMCKDYHTAQKIFLATKQWLKVRLDLDISPEKSKVTNLRKNYSDFLGFKL

SEQ ID NO: 659 - protein, 286 aa, Enterococcus mundtii
GVDNKNIDDLKSIPDTDFISIVQTKLSEYKPQPVKRVEIPKPNGKTRPLGIPTIWDRIVQQCLLQVLEPIMEAKFHDKNYGFRPNRSAHHAFAQAVRMAQVSKLTFVVDIDIEGFFDNVNHSKLIKQLWSLGVRDKWLLGVIRAMLKAPIIHKDGHIEHPKKGTPQGGILSPLLANVVLNELDWWISSQWETHPTRHNYDWYHAEKEYWNKGNKYRALRGTSLKEIYIVRYADDFKIFCRKRSDADKIFLATKLWLKERLKLDISQEKSKVVNLKKQKSEFLGFTL

SEQ ID NO: 660 - protein, 286 aa, Clostridium cellulolyticum
GTDTLNIKDIEKLSVEKLVEMMQRKLAWYQPKPVKRVEIPKPNGKTRPLGIPTIVDRLVQQCILQVLEPICEAKFYERSNGFRPNRSAEHAMAQCYRMVQKQNLYFVVDVDIKGFFDNVNHSKLIRQMWAMGIRDKQLICIIKQMLKAPVVMPDGETLYPTKGTPQGGILSPLLANIVLNELDWWISSQWEDMLTHREYYVSVNNNGSLNKSGVFRTLRRSALKEMYIVRYADDFKIFCRKRSDANKIFVAVKKWLKDRLKLEISEEKSKVVNLKKHYSEFLGFQF

SEQ ID NO: 661 - protein, 286 aa, Streptococcus anginosus
GVDGRTIKHLSRLNEEEYISLIQKQFHWYKPRPVKRVEILKPNGKIRPLGIPTIVDRIVQQCILQILEPICEAKFHDSSYGFRPNRSTEHAIAECARLMQIQHLHYVVDIDIQGFFDNVYHAKLIRQLWNLGIQDKKLLCIIKEMLKADIVMPDKEVITPTKGTPQGGILSPLLSNVVLNELDWWVSSQWLTMPTHYPYKQRTNSQGTEIKSHTYRALRTSNLKEIYIVRYADDFKIFCRNYYDAKRTYQAVTKWLQDRLKLNVSEEKSKITNLKQRYSEFLGFKL

SEQ ID NO: 662 - protein, 286 aa, Enterococcus faecalis
GVDKRTIADLAKLSEEEYVRLIRKQFSNYHPGPVRRVEIPKPNGKTRPLGIPTIVDRIVQQCILQVMEPICEAKFSENSNGFRPNRSAETAIAQCMRLIQVQHLYHVVDLDIKGFFDNISHTKLIRQIWALGIRDKKLLCIIKEMLKAPVVLPNGEKTYPARGTPQGGILSPLLANIVLNELDWWIASQWEEMPTKTKFKTRSNAQGTEIKSHAYRALRRSRLKEMHAVRYADDFKIFCATHEDAVRAYKATELWLKDRLGLEISPDKSKVVNLKRQYSDFLGFKL

SEQ ID NO: 663 - protein, 273 aa, Halobacteroides halobios
GTNNKTIKDLEEKSTEELVEYVRNRLEYYVPQSVRRVYIPKPDGRKRPLGIPTIKDRLIQQCIKQVLEPICEAKFHNHSYGFRPNRSTKHAIARIMYLINFSKLHYTVDIDIKSFFDNVDHNKLKKQLWSMGIRDKKLISILGNMLEAKIEGEGVPEKGTPQGGIISPLLSNIVLNEMDWWISNQWETFKTDYKYNRKGDKITAIKKTNLKEIYIIRYADDFKIMCRDFETASKIKIATIKWLKERLNLEVSEKKTSITNLKKNHTEFLGIKL

SEQ ID NO: 664 - protein, 288 aa, Clostridium botulinum
GTNHKTINDIAGESEDEIIEYVRKRLNKFYPHSVKRIYIPKNNGDKRPLGIPTIEDRLIQRSILQVLEPICEAKFHPHSYGFRPNRSTEHAIARAMTLINMNKLHYVVDVDIKGFFDNVNHGKLLKQLWTLGIKDKKLIKIISLMLKAQIKDGSMITNPVKGTPQGGIISPLLANVVLNELDWWISSQWETFETKHNYSKLRTFKNGTTTIDKSHKYRALRNGKLKEIYIVRYADDFKVFCKNPKDAEKIFIAIKLWLKERLDLETSPEKSKVTNLRKHPTEFLGFEL

SEQ ID NO: 665 - protein, 283 aa, Bacillus thuringiensis
GSNDTTILEIAEQNLTTFVAKVQKALENYNPKPIRRVYIPKRNGDKRPLGIPTMEDRIVQQCIKQILEPICEAKFYNHSYGFRPNRNAKHAIVRAMSLMNISKFHYVVDIDIKGFFDNVNHGKLLKQIWSLGIRDKSLLSIISKILKTEIENVGKMEKGTPQGGIISPLLSNIVLNELDWWISSQWETMITRHNYESIDKRNNTIIRSHKYTALRRTSNLKEMFLVRYADDFKIFCKDFNSAQKTLIAVKKWLKNRLGLEVNNEKSKVTNLRRNYTEFLGFKL

SEQ ID NO: 666 - protein, 274 aa, Lysinibacillus sphaericus
GTDGITIEQYKIEDVETFVDEIRATLKNYKPQTVRRVEIPKPNGKTRPLGIPTMRDRLIQQMFKQILEPICEARFYNHSYGFRPNRSTHHAMGRCQFLANIALNQHVVDIDIQGFFDNVSHSKLLKQMYSIGICDKRVLSVVSKMLKAPIKGIGIPTKGTPQGGILSPLLSNIVLNDLDWWISNQWENMKTKFNYKERKNKVLMIKRTTTLKEMYIVRYADDFKIFTKSHKNAIKLYHAVKGYLKNHLNLDISNEKSKITNLRKRASEFLGFSL

SEQ ID NO: 667 - protein, 272 aa, Enterococcus mundtii
GTDGITIDDYKLANIEIFVSYIRSVLSNYKPQKVRRVYIPKSNGKKRPLGIPTMRDRIIQQMFLQILEPICEAQFYNHSYGFRPNRSTKHAMARCKFLTRKNFHYVVDIDIKGFFDNVNHNKLIKQLYTIGIKDKRVLAILAKMLKATIEGEGIPKKGTPQGGILSPLLSNVVLNELDWWIANQWEFLKTKENYHPAARLKSLKRKTTLKEMFIVRYADDFKIFTKDHQSAIRIYHGVKGYLSNHLSLDISPEKSKITNLRKRDSEFLGFSL

SEQ ID NO: 668 - protein, 273 aa, Clostridium kluyveri
GVNTNTIMDIGEENPDELAIYVRERLINYKPQPVRRVEIPKPNGKMRPLGIPTIEDRIIQQCIKQVLEPICEAKFHKDSYGFRPNRSTHHAIARTYSLANINKLTYVVDIDIKGFFDNVNHSKLLKQMWTMGIQDKNLLCVISKMLKAEIKGVGIPNKGTPQGGILSPLLSNIVLNELDWWISNQWQTLKSKFPYKREIFKYQALKRSKLKEVYIVRYADDFKLFCRSYNNAKKIFKAVTMWLKERLGLEINEEKSSIVNLKQKYSEFLGFKF

SEQ ID NO: 669 - protein, 273 aa, Enterococcus faecium
GTDGMTIDDIKQLSNAEIVATVRESLSNYRPKSVRRVFIPKAGSDKMRPLGIPCIWDRLVQQCILQVLEPICEPKFHNHSYGFRANRSAHHAVSRVTTLINLSKYHYCVDVDIKGFFDNVNHGKLLKQIWTLGIRDKRLICIISKMLKAEIDGEGVPEKGTPQGGLLSPLLSLIVLNELDWWVSSQWETFQPKNRSKNGWLQYAKKYTKLKSGFIVRYADDFKIMCSTYGEAQRFYHSTVDFLNKRLKLEISPEKSKVVNLKKNSSDFLGFKI

SEQ ID NO: 670 - protein, 275 aa, Bacillus cereus
GVDNLTIKDIWHLNDTKIIHEVRKRLNNYQPQAVKRVLIPKEGSDKKRPLGIPTIWDRLVQQSILQVLEPICEAKFHNHSYGFRPNRSTHHALSRVVSLINIGHQHYCVDIDIKGFFDNVCHKKLLRQMWTLGIRDKSLLCVISKILKSEIEGEGIPNKGTPQGGIISPLLSNIVLNELDWWISSQWETYKPHRISTRHLGFRQYARKYTNLKCGYVVRYADDFKIMCRTYDEAQRFYHATVDFLKSRLGLEINPKKSKVVNLKKNSSVFLGFKI

SEQ ID NO: 671 - protein, 275 aa, Bacillus thuringiensis
GVDGLTIKDVRQLNDFQVINQVRKRLMNYRPSPVRRVYIPKEGSDKKRPLGIPTIWDRLVQQCILQVLEPICEAKFHNHNYGFRPNRSTHHALSRMVSLINVGKHHYCVDIDIKGFFDNVQHGKLLKQMWAIGIRDKRLLSIISNLLKAEIIGEGIPSKGTPQGGILSPLLSNIVLNELDWWISNQWETYKPHRFKDGPNGFTTYARKYTNLKGGYIVRYADDFKIMCRTYEEAQRFYHATVDFLKARLGLEINPEKSKVVHLKKNSSDFLGFKI

SEQ ID NO: 672 - protein, 275 aa, Bacillus thuringiensis
GTDGMTINDIKMLSTDEVIEKVKMMFGWYEPQSVRRVFIPKPNGNRRPLGIPTIWDRLFQQCVLQILEPICEAKFHNHSYGFRPNRSTHHALARMKSLVNRKGNGFHYCVDIDIKGFFDNVHHGKLLKQLWTIGIRDKKLLSIISRLLKAEIVNEGVPQKGTPQGGILSPLLSNIVLNELDWWVSNQWETIKTSHPYKGNSDKYRALKKSKLKECFLIRYADDAKILCRDYVTALKMFEATKDFLRTRLHLDISLEKSKIINLRKKASHFLGFTV

SEQ ID NO: 673 - protein, 285 aa, Clostridium botulinum
GTDGSTIKDINNIDIDEVITKIKTMFDFYTPKSIRRVEIPKANGKTRPLGIPTIWDRLFQQCILQVLEPICEAKFHKHSYGFRPNRSTHHAITRSVYLINITKLYHCVDVDIKGFFDNVNHGKLLKQLWALGVKDKKLLKIISVMLKAPIEGIGIPTKGVPQGGILSPLLSNIVLNELDWWVSNQWETFKTDKDYTKYRTSKTGKIVVDHSIRNKMLKKSKLKEIYIVRYADDFKIFCRTRSQAKAIDIAVGDMLKNRLGLECSAEKSKVLNLKKSYSEFLGFKM

SEQ ID NO: 674 - protein, 273 aa, Bacillus megaterium
GDDGLTIEDINRLSVSEVVSTIQRMFEYYTPQAVRRVFIPKANGKTRPLGIPTIWDRLFQQCILQVLEPICEAKFYKHSYGFRPNRNTHHAKARFETLINRACLYHCVDVDIKGFFDNVNHAKLIKQLWSLGIRDKALLSIISRLLKAEIIGEGFPKKGTPQGGILSPLLSNIVLNELDWWVSNQWESFETHKLYKSNLGRYNALKQSNLKHCYIVRYADDFKILCRTRSQAIKMYYAVNDFLHTRLRLEISEQKSKVVNLKKNSSEFLGFRS

SEQ ID NO: 675 - protein, 277 aa, Geobacillus kaustophilus
GTDGKTISDILTLNYDEAINFVKRCFKKYTPNPIRRVHIPKPGKKEKRPLGILTIADRIIQECVRMVIEPILEAQFFQHSYGFRPYRDAKQAIERCVFICNRIGYNWVIEGDIKGFFDNVNHTILIKQLWHMGIRDRRMLMIIKAMLKAGVIKETKINEMGTPQGGIISPLLANVYLHKLDQWITREWEEKKMRNGTTIRTAKYKSLRDHSTITKPEFYVRYADDWVLFTNSRGNAEKWKYRIKKYLKENLKLELSDDKTLITNIKKKPMKFLGFKI

SEQ ID NO: 676 - protein, 276 aa, Bacillus pseudofirmus
GTDGETIDDILQDGYESVISRVRKCFLAYNPKLLRRVHIDKQVSKDKRPLGIPAIIDRIIQECIRMIIEPILEAQFFSHSYGFRPYRSAEHALSKVTNTAYDTNYCWVVEGDIKKFFDNVNHTILIKKLYSMGIRDRRVLMIIKAMLQCGVLGEAEQTTVGTPQGGIISPLLANAYLDSLDHWITREWENKETKHEYSRLDGKYRALKNASNLKPAHFVRYADDWVLITNSKANAIKWKQRIAKHLKEQLKLELSEEKTLITNIKKKAIKFVGFHF

SEQ ID NO: 677 - protein, 274 aa, Bacillus cereus
GVDGKTIQDYLRLSEEKLIELIRGRLTNFKAHLIKRVFIPKANGGQRPLGIPTIEDRIIQQMMKQVLEPVLEAQFFKYSFGFRPERTTYHALERVKVLVHNTGYHWIVEGDIRQFFDKVNHRILIKKLWSMGIKDRRILCLITEFLKAGIFKNIIRNDNGTPQGGILSPLLANVYLHSFDKWVAKQFEEFTTRHEYSKHDHKLRGLKSSNLKPGYLIRYADDWVLVTNNKSHAYRWKTVIKNFLQKELKLELSEEKTRITNIRHKPIEFLGFKY

SEQ ID NO: 678 - protein, 276 aa, Bacillus thuringiensis
GVDSLTINDILQADEEKVIHLITNTIRDYTPSMVRRVWIPKAGKKELRPLGIPTILDRIIQQCVKQVIEPICEAQFFPYSFGFRPYRDGHMAIERVGSLIHKTKYHWIVEGDIRKFFDKVNHNILLKNCFKIGIQDKRVLMLIKAMLKAGVMHENTKTTLGTPQGGIISPILANIYLHDFDMWVYNQWQNKKTRKNYANKHSRTTTLKRTTKLKQGYLIRYADDWVIVTNSKTNAIKWKKAVSHYLKDKLKLELSEEKTKITNVRKKNIEFLGFKL

SEQ ID NO: 679 - protein, 290 aa, Geobacillus sp.
GIDQKIVDDYLLMPTEKVFGMIKAKLNDYKPIPVRRCNKPKGNAKSSKRKGNSPNEEGETRPLGISAVTDRIIQEMLRIVLEPIFEAQFYPHSYGFRPYRSTEHALAWMLKIINGSKLYWVVKGDIESYFDHINHKKLLNIMWNMGVRDKRVLCIVKKMLKAGQVIQGKFYPTAKGIPQGGIISPLLANVYLNSFDWMVGQEYEYHPNNANYREKKNALAALRNKGHHPVFYIRYADDWVILTDTKEYAEKIREQCKQYLACELHLTLSDEKTFIADIREQRVKFLGFCI

SEQ ID NO: 680 - protein, 277 aa, Bacillus pseudofirmus
GIDNKTIDYYLHLPYEDLVSQVQTCIEDYNPEPVRRKYIPKENSDKLRPLGIPTMIDRIIQEITRLVIEPIAEAKFYKFSYGFRPMRSAEHAMAEILEKARKSKTYWVIEGDIKGYFDNINHNKLITMLWKIGIKDKRVLSIIKKMLKSGIVEEDGEIYPSDLGSPQGGIISPLLANIYLNFFDWMIAEEFDQHHYINNYERRDKGLRAIRRDHKPVYSIRYADDWVVLCSSKKQADTLLIKIRKYLKHQLSLELSEEKTKITNLVEEKASFLGFEF

SEQ ID NO: 681 - protein, 276 aa, Bacillus cereus
GIDKKDVNYYLQMEAKQLIKLIRQHIDNYKPNPVRREYINKGNGKKRPLGIPTMIDRIIQEIARIVLEPIAEAKFFNHSYGFRPYRSCHYAIGRVLNTISRSKTYIAIEGDIKSFFDHINHNKLVEMMWNMGIKDKRFLIIIKKMLRAGVLEDKVILPTEIGTPQGGIISPLLANIYLNNFDWMVAKEFEEHRARYTVKHAFRSGLTKVGRRHKKCFLIRYADDWIILCEDTVQARILLTKIDKYYKHILKLELSKEKTFITDLREKPARFLGFDI

SEQ ID NO: 682 - protein, 286 aa, Bacillus cereus
GVDGTTINDYLQMDRKQLINLIQSQIDNYNPSTVRRTYIPKGNTGKLRPLGIPVIVDRIIQEIARMAIEPYCEAKFYPHSYGFRPYRSSEHAIARIVQNINSKAYIAIEGDIKGYFDNINHNKLLAILWEMGIKDKQFLFLIKKMLKSKILDNGNIISSDKGTPQGGIISPLLANVYLNNFDRMVSDLWESHSAVTTYAATRNGKTVEEKNYQFLRKKSVAKHYKTNLVRYADDWIILTETKEYAEKLLTKLRKYMKHQLSLELSEEKTVITDSREEPLHFLGFRI

SEQ ID NO: 683 - protein, 247 aa, Streptococcus agalactiae
GIDGVTIEQMDDYLHQNWRETKKLIKERSYKPQPVLRVEIPKPNGGVRNLGIPTAMDRMIQQAIVQVLSPLCEKHFSEYSYGFRPNRSCETAIVQLLEYLNDGYEWIVDIDLEKFFDTVPQDRLMSLVHNIIQDGDTESLIRKYFHSGVVINGQRHKTLVGTPQGGNLSPLLSNIMLNELDKGLEKRGLRFVRYADDCVITVGSEAAAKRVMHSVSSYIEKRLGLKVNMTKTKIVRPNKLKYLGFGF

SEQ ID NO: 684 - protein, 249 aa, Escherichia coli
GIDNMSIEEFNDFAKLHWLGIKQQLLNGSYQPLPVKRVMIPKPDGGERMLGIPAVIDRVIQQAIAQVISPYFEPQFSPHSYGYRPHKRASQAVNHVQSCVKQGYKTAVDIDLSKFFDEVDHDMLMNRVSRKIKDKALMRLLGKYLRAGIAERETGLWFESTKGVPQGGPLSPLLSNILLDELDKKLTYKHLKFARYADDIIILVKTKSEGLIIQREITAFITKRLKLKVNESKSRVGPVSGSKFLGFTF

SEQ ID NO: 685 - protein, 247 aa, Lactobacillus reuteri
GIDDMTVNDLLPYLRENKTELIASLREGKYKPAPVKRVEIPKPNGGVRKLGIPTVVDRMVQQAVAQILTPIFERVFSDNSFGFRPHRGAHDAIAKVVDLYNQGYRRVVDLDLKAYFDNVNHDLMIKYLQQYIDDPWTLRLIRKFLTSGVLDHGLFAKSEKGTPQGGPLSPILANIYLNELDKELTRRGHHFVRYADDCNIYVKSQRAGERVMRSITQFLEKRLKVKVNPDKTKVGSPLRLKFLGFSL

SEQ ID NO: 686 - protein, 247 aa, gammaproteobacterium sp.
GIDGMPVEDLESHLRHHWPTLRQSLLDGTYQPKPVKRVEIPKGDGTKRALGIPTVIDRFVQQIIAQALSALWEPHFHPSSFGFRPARSAQQAVKYVQTLQREKYEWVVDLDLKSFFDEVNHDRLIARLKTRVEDKVLLRLINKFLHAGINANGILLRSEKGVPQGGPLSPILANIVLDELDWELEHRGHKFARYADDCNIMVKSKAAGERVMKSIRRFLETTLRLRVNDQKSAVDRPTKRNFLGFTF

SEQ ID NO: 687 - protein, 247 aa, Microscilla sp.
GVDGMQVKELRYWFSNNHQKLIEQLKEGNYRPMTIKGQEIPKPGGGVRQLGIPTVQDRLVQQAIAQQLSKRYDPTFSQYSYGFRKGRNAHQALRQAGAYVKEGFNYVVDLDLEKFFDKVNHDRLMWLLGRRISDKRVLKLIGKFLRSGILIGGLENQRISGTPQGSPLSPLLSNIVLDELDKELERRGHRFVRYADDMILLVRSQEAAERAYSSITSFIENRLLLKVNKDKSRICRPYQLNFLGHSI

SEQ ID NO: 688 - protein, 247 aa, Nitrosomonas europaea
GIDGVTTAEWPEHARAHWPATREQIEAGRYRPQPVRRVDIPKPDGGQRQLGIPTVTDRVIQQAIAQVLIPIFDPGFSASSFGFRPGRNAHQAIRQVQAHVKAGYRWAVDLDLARFFDNVNHDLLMSLLSRSIADKRLLALIGRYLRAGVLVGEHPQPSEVGTPQGGPLSPLLANVLLHQFDLELERRGHRFARYADDVIILVKSRRAAERVMQSLTYFLQSTLKLTVNLAKSQVAPMSECSFLGFTL

SEQ ID NO: 689 - protein, 247 aa, Geobacter sulfurreducens
GVDGVTIDAFPERFRPLWGDIRASLATGTYQPQPVLRVEIPKPTGGTRPLGIPTVLDRLIQQATAQVLTPIFDPEFSASSFGFRPGRSAHNAVRQLREYLRQGYRIAVDIDLAKFFDTVNHDLLMTMVGRRVRDKRVLTLIGRYLRAGVEVDGRLEKTRMGVPQGGPLSPLLANILLDHLDKELESRGHKFVRYADDFVILVKSERAGERVMGSVRKYLTNKLKLTVNEDKSKVARSGDLSFLGFVF

SEQ ID NO: 690 - protein, 248 aa, Shewanella baltica
GIDGMTIEAFPLWMQQGGWQRCKSLLERGEYNPSAVRRVEIDKPDGGKRKLGIPNVIDRVIQQAIAQILTPLFDPFFSANSFGFRPNRNAKQAVLQVRDIIKQKRKFAVDVDLSKFFDRVNHDLLMTQLRIKVQDKRLLALIGKYLRAGVTVNDQFEASFEGVPQGGPLSPLLSNIMLDSLDKELESRGHKFARYADDFIILVKSIRAGERVLKSITRYLATKLKLVVNEQKSQVVEVGQSKFLGFTF

SEQ ID NO: 691 - protein, 248 aa, Pseudomonas aeruginosa
GIDGMNIDEFPAWVRSGNWKALKQQLVTGCYQPSPVRRVEIAKPDGGTRQLGIPTVTDRVIQQAITQVLTPIFDPEFSEHSFGFRPGRNGQQAVKQVQSIIKEGRRFAVDVDLSKFFDRVNHDLLMTRLGDKVKDKRLLRLIKRYLRAGFIDNQFKGESRVGVPQGGPLSPLLANIMLDSLDKELEKRGHKFARYADDFTILVKSQRAGERVLRSISQYLQSRLKLVVNTDKSRVVKTNESQFLGFTF

SEQ ID NO: 692 - protein, 247 aa, Geobacter uraniireducens
GVDNMPVTALKGYLQEEWPRIREELLTGTYHPQPVRKVEIPKPGGGTRMLGIPTVLDRLIQQAVHQVLSPLFDPGFSISSHGFRPGRSAHQAIKAARKYVESGLRWVVDIDLEKFFDRVHHDTLMSLVKRKVGDRLVLSLIDSYLKAGILEGGVTSPRLEGTPQGGPLSPLLSNILLDELDKKLERRGHKFCRYADDANIYVATRRSGERVMASITGYLSERLKLTVNQGKSAVDRPWKRSFLSYSM

SEQ ID NO: 693 - protein, 247 aa, Pseudomonas alcaligenes
GADGMTVADLAGYVKQYWPTLKARLLAGEYHPQAVRAVEIPKPQGGTRQLGIPSVVDRLIQQALQQQLTPIFDPLFSDYSYGFRPGRSTHQAIEMARAHVTAGHRWCVELDLEKFFDRVNHDILMACIERRIKDKCVLRLIRRYLEAGIMSGGVVSPRQEGTPQGGPLSPLLSNILLDELDRELERRGHRFVRYADDANIYVRSPRAGERVLVSVERFLRERLKLTVNRKKSQVARAWKCDYLGYGM

SEQ ID NO: 694 - protein, 247 aa, Bacillus sp.
GVDEKDIEATRLYLRENGQEIIQLIREGKYKPQPVRRVEIPKANGGKRQLGIPTVTDRVIQQAVVQRLTPIFERQFSHFSYGFRPNKSAHQAIEQARQYIEEGYNFVVDMDLEKFFDRVQHDKLMSLIAKTISDKPTLKLIRRFLQAGVMVNGVVITNREGTPQGGPLSPLLSNIILNELDKELEKRGHKFVRYADDCNIYVKSIKAGERVKQGVTEFLERKLKLKVNEEKSAVGKPSARTFLGVSF

SEQ ID NO: 695 - protein, 248 aa, Clostridiuma cetobutylicum
CGVDGMKVDELLQYLKQNGKTLIASIFNGKYCPKAVRRVEIPKPDGGIRLLGIPTVVDRTIQQAISQVLTPIFEKTFSENSYGFRPKRSAKQAIKKAKEYMEEGYKWVVDIDLAKYFDTVNHDKLMALVARKIKDKRVLKLIRLYLQSGVMINGVVSETERGCPQGGPLSPLLSNIMLTELDRELEKRGHKFCRYADDNNVYVRSKKAGDRVMRSITRFIENKLKLKVNKEKSAVDRPWRRKFLGFTF

SEQ ID NO: 696 - protein, 247 aa, Bacillus halodurans
GVDEMDVKSLRLHLHENWTSIRNEIIEGSYFPKPVRRVEIPKPNGGVRKLGIPTVMDRFLQQAIAQILTQLYDPTFSERSFGFRPHRRGHNAVRQAKQWMKEGYRWVVDIDLEKFFDKVNHDRLMRKLSSRIQDPRVLQLIRRYLQTGVMERGLVSPNTEGTPQGGPLSPLLSNIVLDELDNELEKRGLKFVRYADDCNIYVRSKRAGLRIMESVTSFIENRLKLKVNREKSAVDRPWNRKFLGFSF

SEQ ID NO: 697 - protein, 247 aa, Oceanobacillusi heyensis
GIDEMSVKFLRRHLYDNWDSLRENLRKGTYTPSPVRRVEIPKPSGGVRMLGIPTVTDRFIQQAIAQVLHTIFDPSFSEHSYGFRPNRRGHDAVRKARGFIKEGYRWVIDMDLEKFFDKVNHDKLMGVLAKRIKDKELLRLIRKYLQSGVMINGIVVSSEEGTPQGGPLSPLLSNIILDDLDKELEERGLRFVRYADDCNIYVRTKKAGNRVMNSITTFIEEKLRLKVNKEKSAVDRPWKRKFLGFSF

SEQ ID NO: 698 - protein, 246 aa, Pseudomonas syringae
GVDGLGIVETAEHLKTAWPGIRAQLLAGTYRPDPVRRVLIPKPGGGERKLGIPTVTDRLIQQALLQVLQPLLDPDFSNHSYGFRPERSAHQAVLAAQQYIHSGRQIVVDVDLEQFFDCVEHDVLIARLGRKVKDRDVLRLIRAYLNSGALIEGMVMTSTRGTPQGGPLSPLLANVVLDEVDKELERRGHCFVRYADDANVYVRSPKAGQRVMALLRRLYGRLGLRVNESKSAVASAFGRKFLGFSF

SEQ ID NO: 699 - protein, 246 aa, Burkholderia fungorum
GVDGLDIGQTARHLVTAWPVIREQLLKGTYRPDPVRRVTIPKPDGGERELGIPTVTDRLIQQALLQVLQPILDPTFSEHSYGFRPGRRAHDAVLAAQSYVQSGRRIVVDVDLEKFFDRVNHDILIDRLKRRIDDAGVIRLVRTYLNSGIMDDGVVQQRDQGTPQGGPLSPLLANVLLDEVDKELERRGHCFARYADDANVYVRSRRAGERVMALLRRLYGRLRLKVNETKSAVASVFGRKFLGYSL

SEQ ID NO: 700 - protein, 247 aa, Variovorax paradoxus
GVDGRTVQQTGEDLKTQWPDIRRGLLDGTYRPSPVRRVGIPKLGGGTRELGIPTVVDRLIQQALLQVLQPLIDPTFSEHSYGFRPGRSAHQAVQAARQYVEQGRRVVVDVDLGKFFDRVNHDILMDRLGKRIADKAVLRLIRHYLNAGIMAHGVMQMRVEGTPQGGPLSPPLLANVLLDEVDRALERRGRKFVRYADDCNVYVKSERAGQRVLDGVRACYAKLRLKVNETKTAVATAWGRKFLGYCL

SEQ ID NO: 701 - protein, 246 aa, Polaromonas sp.
GVDGLTIEETPEYLKTHWSRIRLELLNGTYRPQAVRRVEIPKPTGGMRELGIPTVLDRLIQQALLQVLQPMIDLTFSEFSYGFRPGRSAHDAVLQAQRYVQEGFQVVVDVDLEKFFDRVNHDILMDRLAKRIADKAVLRLIRQYLQAGIMAGGVVMDRSEGTPQGGPLSPLLANVLLDEVDLDLQRRGHRFARYADDCNVYVRSQKAGERVLLSLRKLYEKLHLKVNEKKTEVGPVFGRKFLGYCL

SEQ ID NO: 702 - protein, 247 aa, Serratia sp.
GVDKLTVQELKPWLKQHWLSVKGTLIAGSYLPRAIRKVDIPKPNGDVRTLGIPTVVDRLIQQAIAQTLSPYVEPSFSNSSYGFRPNRNAWQAVRQAQQYIQSGKRWVVDMDLEKFFDRVDHDILMSRLARTIKDKRLLKLIRRYLEADMVEGKEVIKRDKGMPQGGPLSPLLSNILLDELDKELERRGHSFCRYADDCNIYVSSQKAGKHAQKDISEFLMNTLKLQVNVRKSAVARPWERKFLGYSF

SEQ ID NO: 703 - protein, 247 aa, Serratia sp.
GVDNLSVGELKGWLKQHWASVREALLQGNYVPQAIRQVEIPKPDGGVRILGIPTVVDRLIQQAIQQHLTPDYEPEFSDSSYGFRPGRNAGQAVQQAQSYMQSGRRWVVDLDLEKFFDRVNHDILMARLSWKIKDTRLLKLIRRYLEADRVAGSEITRRREGMPQGSPLSPLLSNILLTDLDRELERRGHKFCRYADDGNIYVCSRQAGEHAMKEISHYLENKLRLKVNAHKSAVDRPWKRKFLGYSV

SEQ ID NO: 704 - protein, 247 aa, Cupriavidus taiwanensis
GVDALEVTALRDWLKVSWPSVRAALLGGQYIPQSVRAVDIPKPSGGVRTLGIPTVVDRLIQQALLQVLQPLYEPGFSESSYGFRPRRSAQQAVLQAQRYVQEGRRWVVDIDLEKFFDRVNHDILMSRVARQVKDVRVLKLIRRYLEAGLMRGGVVEARRQGTPQGGPLSPLLSNILLTDWDRELEKRGLAFCRYADDCNIYVRSQAAGQRLLAGMMTFLAERLNLQVNEAKSACARPWARKFLGYSL

SEQ ID NO: 705 - protein, 247 aa, Dickeya zeae
GVEGMSVSELPDYLKHHWPELKAQLLSGSYCPSPVRRVTIPKPGGGERLLGIPTVVDRFVQQATMQVLQRQWDASFSDSSYGFRPGRSAHQAVKQAQGYIGSGHHWVVDLDLEKFFDRVNHDVLMSRVAKRVSDKRVLSLIRGFLNAGVMEAGLVSPVTEGMPQGGPLSPLLSNLLLDDFDKELEKRGLKFARYADDCNIYVKSERAGNRVMEGLTHWLSRKLKLKVNAKKSAVAHPAMRKFLGYSF

SEQ ID NO: 706 - protein, 249 aa, Burkholderia vietnamiensis
CGVDGMTVQALPAFLREQWPSIRATLLNGTYKPQPVRRVEIPKPDGGGVRKLGIPCALDRFVQQAVLQVLQRQWDPTFSEASYGFRPGRSAHQAVAKAQSYIQSGYRWVVDLDLEKFFDRVNHDILMSRVARRVSDRRVLKLIRSFLTAGVMEHGLVGATDEGTPQGGPLSPLLSNLMLDDLDRELGRRGLRFVRYADDCNVYVRSERAGQRVMVGLKAFLTGKLKLKVNEAKSAVARPHTRKFLGFSF

SEQ ID NO: 707 - protein, 247 aa, Solibacter usitatus
GVDGMTVIGIKDYLKQHWPAIRGQLLSGTYEPKPVRRVEIAKPDGGVRKLGIPTVLDRFIQQAVMQVLQRRWDRTFSDYSYGFRPGRSAQQAVAQAQQYIAEGHGWCVDLDLEKFFDRVNHDKLMGQIAKRIADKRLLKLIRAFLNAGVMENGLVSPSVEGTPQGGPLSPLLSNLVLDEFDRELERRGHRFVRYADDCNIYVRSERAGQRVMESITQFITQKLKLKVNETKSAVARPQERKFLGFSF

SEQ ID NO: 708 - protein, 247 aa, Bradyrhizobium sp.
GVDGMTVDDLPTYLKANWLTIRAQLLDGTYKPQAVRRVEIPKASGGVRLLGIPTVVDRFIQQAVLQVLQGEWDRTFSDASYGFRPGRSAHQAVTKAQAYIASRHRIVVDIDLEKFFDRVNHDILMGLVAKRVADKRLLKLIRGFLTAGVLEGGLVSPTEEGAPQGGPLSPLLSNLMLDVLDKELERRGHRFVRYADDCNIYVRSRKAGERVMASIETFLERCLKLKVNRAKSAVARPNHRKFLGFSF

SEQ ID NO: 709 - protein, 248 aa, Myxococcus xanthus
GQDGITFEHIEERGRAGFLGAVAEELRTGTYRPRPYRRREIPKEGGKVRVISIPSIRDRVVQGALRLVLEPIFEADFSGSSFGARPGRSAHEAIDTVRQGLRRRRHRVVDVDLKAYFDSIRHAPLLERVARRVQDGEVLALVKQFLRSTGDRGIPQGSPLSPLLANIALNDLDHVLDRGRGFLTYARYLDDMVVLAPDSEKGRRWAARALERIRQEAEALGVSLNKEKTRTVTMTDRNASFAFLGFDF

SEQ ID NO: 710 - protein, 255 aa, Cupriavidus necator
GIDDLSFEDIEASGRIVFLAEIQADLKTGRYEPKPNRRVEIPKSNGKVRVLQVPCIRDRVVQGALKLILEAVFEADFCPNSYGFRPKRSPHRALAEVRRSVLRRMSTVVDVDLSRYFDTIQHSTLLGKIAKRIQDPQVMHLVKQVIKAAGKVGVPQGGPFSPLAANIYLTEIDWMLDEIRRKTAQGPYEAVNYHRFADDIVITVSGHHTKRGWAERALLRLREQLVPLGVELNTEKTTVVDTLHGEAFGFLGFDL

SEQ ID NO: 711 - protein, 255 aa, Bacillus thuringiensis
GIDGKSFADIELEGVIPFLTGIQEELQAGIYQPQANRKVEIPKTNGKMRTLQIPCIRDRVVQGALKLILEAIFEADFCPNSYGFRPKRSPHQALAEVRRSILRRMTIIIDVDLSRYFDTIRHNILLEKIAKRVQDPQVMHLVKQVIKATGKIGVPQGGPFSPLAANIYLNEVDWTFDTIRRKTADGNYEAVNYHRFADDIVIAVSGHSSKSGWAELALRRLWEQLKPLGVELNLEKTQMVNVLKGESFGFLGFDL

SEQ ID NO: 712 - protein, 255 aa, Wolbachia endosymbiont
GIDGVTFESIETEGSRKYLQRIRHELITKTYSPNRNRRKEIPKSGEKFRTLNIPCIRDRIVQTALKLILEPIFESDFQKGSYGYRPKRNAHEAVQKVTEAAIKGNTKVIDVDLKSYFDSVRHHILMEKIAKRINDKEIMRMIKLILKIGGKRGMAQGSPLSPLLSNIYLNEVDKMLEKAKEVTKEGKYQRMEYARWADDLVILIREYPKREWLERAVYRRLEEELAKLEVRVNEEKTKVINLKKGETFSFLGFDF

SEQ ID NO: 713 - protein, 256 aa, Acetohalobium arabaticum
GVDGITFEDIEGIGVLKYLKKIREELVNETYKPQENRKQEIPKGNGKVRVLGIPTIKDRIVQGALKLILEPIFEADFQESSYGYRPKRTAHQAVKKIEKAIVSGKRKVIDLDLSSYFDTVKHHILLAKIAKRVIDKEVMHLIKLMLKASGKEGVPQGGVISPLFANLYLNEVDRMLERAKEVTKSKGKYTELEYARFADDIVIAVSSHPSMNWLLSKVIQRLKEELDKIKVKVNKEKTKVVNLEKGERISFLGFTL

SEQ ID NO: 714 - protein, 255 aa, Magnetococcus sp.
GIDGVTFEAIEESGVEQFLGEVRKELVSGSYRPLKNRRKAIPKGDGKERVLGIPSIRDRVVQGALKLILEPIFEADFQSGSYGYRPKRMAHQAVNRVAIAIAQGKTQVIDADLKSYFDTVQHDLALRKVSERVDDDQVMHLLKLIFKTSGKRGVPQGGVISPLISNLYLNEVDKMLERAKEVTRKGKYTHIEYARFADDLVILVDGHHRWNGLARKVYQRLGEELAKLKVQLNLEKTRVVDLTRGEDFTFLGFNI

SEQ ID NO: 715 - protein, 255 aa, Desulfotomaculum acetoxidans
GIDGITFDNIEASGIEIFLQQIQKELISGTYWPTQNRRKEIPKGDGKYRILGIPTIRDRVVQGALKLILEPIFEADFQEGSYGYRPKRNPHQAIDRVAKAVVENKTRVIDLDLRSYFDTVRHDLLLKKVAKRVNDENVMRLLKLILKASGKRGVPQGGVISPLLANLYLNEVDKMLEKAKEVTRHEQYTHIEYARFADDIVILIDAYPKWNWLEKAVYQRLLEELTKLDVQLNEEKTRIVNLANGESFGFLGFDF

SEQ ID NO: 716 - protein, 253 aa, Rhodococcus sp.
GIDRITLEEVEEYGVARLLDELAVELKEGSYRPLPARRVFIPKPGTVEQRPLSIPSVRDRIVQAAWKLVAEPVFEADFLPCSFGFRPRRGAHDALQVLIDESWRGCRWVVETDIANCFEAIPIEKLMQAVEERVCDQPFLKLLRVMLRAGVMEEGQVRRPVTGTPQGGVASALLCNVYLHRLDRAWDVDEHGVLVRYADDALVMCRSRRQAEAALTRLRELLADLGLEPKEAKTRIVHLRVGGEGVDFLGFHH

SEQ ID NO: 717 - protein, 263 aa, unidentified
  source 1..263: note = uncultured marine bacterium
GVDHVSMEAIASNPRKYLYPLWNRLSSGSYFPPPVKLVPIPKGDGKERMLGIPTIIDRVAQEVIKAELEVIVEPRFHPSSFGYRPHKSAHEALEQCAKNSWERWYVVDLDIKGFFDNIDHEKMMGILRKHTNKKHILLYCDRWLKTPMQDRVGGVQARMKGTPQGGVISPLLANLYLHEAFDQWISTTQPRIVFERYADDIVIHTRSMEQSHFILDKLKARLKSYSLELHPDKTKIVYCYRTARFHKEGKEIPVSFDFLGFTF

SEQ ID NO: 718 - protein, 260 aa, Serratia odorifera
GVDGMTIEAFEHNLARNLYKIWNRLSSGCYMPPPVKRVEIPKSDGKTRPLGIPTVSDRVAQMAVKMILEPQWDPLFSDSSFGYRPGKSAHDAVAQAKANCWKYEWVIDLDIRGFFDNLDHALLLKAVDHLHPAPWVRLCIVRWLKAEIIFPDGHRHSPEKGTPQGGVISPLLANLFLHYTQDKWLEKHYPNNSWERYADDSIIHCRSRREAGLLLSQLRERMKACGLELHPEKTRIVNCHPLTRRKNDGHYSFDFLGFTF

SEQ ID NO: 719 - protein, 259 aa, Cellvibrio sp.
GADNVCIDMFEHNLENELYKLWNRMSSGSYMAPPVKRVEMAKADGKLRPLGIPTVADRVAQMVVKMTLEPEWDSKFHASSFGYRPRRSAHHAVQAAKINCWKYSWVIDLDIKGFFDNLNHDQLQKFVAQATDDPWCKLYIKRWITAGVQMPGGELHKTAKGTPQGGVISPLLANLYLHKVFDSWMQKYFPQNPFERYADDIVCHCRTEHEAEQLLSAISRRMQRFDLTLHPEKTKIVYCGRRKIERTKAQSFDFLGFTF

SEQ ID NO: 720 - protein, 262 aa, Frankia sp.
GPDGVTVEQFEANVKDRLYVLWNRMSSGSYFPGPVGAVEIPKKGVKGGARTLGIPNVVDRVAQTVLKLALEPKVEPVFHRDSYGYRPGRSQRQALEVCRKRCWSHDWVVDLDVRKFFDTVPWEKLLKAVAYHTDQKWVLMYVERCLKAPTKHADGTLQERTMGTVQGGPFSPLAANIYLHWGLDAWMAREFPTVPFERWADDVVFHCVSLEQAREVRDAVVARLVEVGLEAHPDKTRIVYCKDSNRGGDYENTSFTFLSYTF

SEQ ID NO: 721 - protein, 261 aa, Zunongwangia sp.
GIDTVSIEQFDESLSKNLYKLWNRMASGSYFPPAVKEVEIPKKDGKVRKLGIPTISDRIGQMVVKMYLEPRLENVFNPNSYGYRPNKSAHQALEQVRKNCWKMDWVIDLDIKGFFDNIDHHKMMLAIEKHVPERWVRLYIARWLASPVMTKSGNLVSNQGRGTPQGGVISPLLANLFLHYGLDKWLEQNDNTVKFTRYADDVIVNCKSQKHAEQTLEAIKSRMHQIGLELHPEKTKIVYCRDYRRQEKYSNVKFDFLGYSY

SEQ ID NO: 722 - protein, 260 aa, Leadbetterella byssophila
GIDTQSLEQFEERLADNLYKIWNRMTSGSYHPKAVREVQIPKKSGGYRGLGIPTVSDRVAQQVVKSYLEPKVEPSFHQDSYGYRPNKSAHDALAKTVRNCGYYSWVVDLDIRGFFDNIDHELLMKAVRVYTDEKWIIMYIERWLEVGVVREGKVHKREKGTPQGGVISPLLANIFLHFVFDKWMEKHHGNMPFERYCDDAIIHCTTWNQAVFIKNAVTKRMKECKLELNSEKTKIVYCKNSIHRESNPVPVSFTFLGHTF

SEQ ID NO: 723 - protein, 260 aa, Bacteroides thetaiotaomicron
GIDKVTLEDYEKNLRGNLYKLWNRMSSGSYFPPSVKLVEIPKSTGGKRPLGIPTVSDRVAQMAVVMLITPSIEPCFHEDSYAYRPHRSAHDAVGKARERCWKYAWVLDMDISKFFDTIDHELLLKALKRHTQEKWVLMYIERWLKVPYEKSDGSQVDRALGVPQGSVIGPVLANLFLHYTFDKWMEKNFPRVPFERYADDTICHCHSLKQAEYMQAMIQQRFECCRLRLNEEKTKIVYCKSSRQKECYPNVTFDFLGFTF

SEQ ID NO: 724 - protein, 261 aa, Frankia sp.
GVDGVGLAGFESDLKGNLYRIWNRMSSGSYFPPPVKAVEISKEHGAGTRMLGVPTIGDRIAQTVVAARLEGVVEPKFHPDSYGYRPRKGSLDAVRKCRERCWKYDWVIDLDVRKFFDTVPWDRIIAAVEANTALPWVLLYVKRWLAAPVRMPDGTLAERDRGTPQGSAVSPVLANLFMHYAFDLWMVREFPACPFERYADDAVVHCKSLAQARFVLDRLRKRMEQVGVSLHPEKTRIVYCKDGKRRGSHEHTEFTFLGFTF

SEQ ID NO: 725 - protein, 261 aa, Frankia sp.
GVDGQSIDAFEKDLKNNLYRIWNRMSSGSYFPPPVRAVEIPKAHGGGVRVLGVPTVADRVAQTVVAMTLEPRMEQVFHDGSYGYRVGRSALDAVGACRQRCWQRDWVVDLDIQDFFGSCPHDLIVRAVEVNTDQPWVVLYVRRWLTAPVCYPDGSLVTPDRGTPQGSAVSPVLANVFLHYALDLWLAREFPGLPFERYVDDAVVHCATRRQAEQVRTAIGRRLEEVGLRCHPAKTKVVYCKDSGRRGSHEHTSFTFLGYTF

SEQ ID NO: 726 - protein, 260 aa, Magnetococcus sp.
GLDGLTMEAFEEDLKNQLYRLWNRMSSGSYFPPPVMRVEIPKSDGGVRGLGIPTIGDRIAQAVVKRYLEPLVEPKFHEDSYGYRPNRSALDAVRQARQRCWRDDWVLDLDISKFFDKLDHALVMRAVKRFTDCKWVLLYIERWLKADVQLQDETILHREMGTPQGGVISPLLANIFLHLGFDQWMKENYPHIHFERYADDIVVHCRSLKQLQWIKKRIEQRLKLCKLSLNDKKTRVVYCKDSRRSGEWTCQSFDFLGYTF

SEQ ID NO: 727 - protein, 260 aa, Ruminococcus sp.
GADEQTIKEFEEHLNNNLYKLWNRMASGSYFPKPVRAVAIPKKNGGIRILGIPTVEDRIAQMVAKMYFEPLVEPMFYNDSYGYRPNKSAIQAVGQARERCFKRDWALELDIKGLFDNIKHGYLMYMVEKHTQIKWLILYIKRWLTVPFIMSDGSVAERRSGTPQGGVISPVLANLFLHYVFDDFMTKAYPNIWWERYADDGVLHCQSYKQAAFIKQKLEERFQQFGLELNKEKTRIVYCKDNRRPQNYSCTQFTFLGYTF

SEQ ID NO: 728 - protein, 260 aa, Bradyrhizobium japonicum
GVDGQSLEDFAGDLENHRYRLWNRLVSGSYFPPPVRRVEIPKAGGGIRPLGIPTVADRIAQMVVKRCLEPVLDGEFDPDSYGYRPGKSAHQAIEQARKRCWQHDWVVDLDNKSFFDTIDHELLMRAVYRHTKADWIRLYIERWLKAPVEMPDGSVRARTTGRSQGGVVSPILANLFLHYVFDVWMKGSYPHIPFERYADDIICHCRTRQEAEELKSALERRFADCHLLLHPEKTKVVYCADSNRRRSYPQIHFDFLGFSF

SEQ ID NO: 729 - protein, 260 aa, Paracoccus denitrificans
GVDGQTLESFGERLGPNLYKLWNRMSSGSYMPSSVRRVMIPKADGGQRPLGIPTVTDRIAQEVVRLYLEPLVEPVFHRDSYGYRPERSAIDAIRKARQRCWRYDWVLDMDIKGFFDTIDHELLLKAVRHHTDCRWVLLYIERWLKAPVRMEDGSLVPQERGTPQGGVISPLLANLFLHYAFDRWLDRENPQVPFERYADDIICHCRTEDEARRLWQQVENRLAGCGLTLHPQKTKIVYCKDTNRKGSFPTVAFDFLGYRF

SEQ ID NO: 730 - protein, 260 aa, Ralstonia solanacearum
GVDGQSIEEFEQDLSGNLYKLWNRLASGSYMPPAVRCVEIPKATGGTRPLGIPTVADRIGQMVVKDALEPILEPCFHHDSYGYRPNKSAHDALAVARQRCWRAAWVLDVDIKGFFDNIDHALLMKAVRKHIDCRWITLYIERWLTAPVQLPDGTSQARNKGTPQGGVISPLLANLFLHYVFDMWMVRNFPANGFERYADDVVIHSTSLKQVTMLRAQLTERLADCKLEMSPGKTKIVYCKDKRRKGGYPEISFDFLGYTF

SEQ ID NO: 731 - protein, 260 aa, Halanaerobium praevalens
GIDKISIEKYEKNLKNNLYKLWNRMASGTYFPKAVKAVEIPKKNGGIRVLGVPTVEDRIAQMIVKLSMEKIIDPIFLNDSYGYRPNRSAHDAIKVTRSRCWKYDWVLEFDIKGLFDNINHKLLLKAVYKYAKYKWEILYIKRWLANPVSNNNKITKNTENGTPQGGVISPLLANLFLHFAFDKWMEKRFPNNKWCRYADDGIIHCNSRAEAIFILNCLKERMKECKLEIHPGKTKIIYCKDSNRKENNKLHEFTFLGYSF

SEQ ID NO: 732 - protein, 260 aa, Alkaliphilus metalliredigens
GIDEVTLQEYENNLEDNLYKLWNSMSSGSYFPQAVRGVEIPKKNGGVRVLGVPSIDDRIAQNVMVSELNPKVEPIFYEDSYGYRENKSAIDAIEVTRKRCWEYDWLIEFDIVGLFDNINHDLLMKAVKQHTNEKWVILYIERTLKVPMVMSDGIHVERTKGTPQGGVISAVLANLFMHYAFDHWMTRKHSNNPWVRYADDGLIHSHSLKEAEVLLLKLGERFKDCHLEIHPNKTKIIYCKDDNRKQNHIHTNFDFLGYTF

SEQ ID NO: 733 - protein, 260 aa, Chlorobium phaeobacteroides
GVDQESIEAFEKNLKGNLYKLWNRLSSGSYFPPPVKGVGIPKKTGGIRMLGVPTVADRVAQTVGKETLEPLLEPIFHQDSYGYRPGRSALDAVGVVRERCWKYDWVVEFDISKFFDTMNHELLMRAVRKHCQIEWVLLYVERWLKAPMMSPEGDLVERTKGTPQGGVISPLLANLFLHYAFDRWVSENLPGVPFCRYADDGVLHCKSKEQAVLVMKKITKRFEACGLRVNPDKTRIVYCKDDKRKEDHPVTSFTFLGYTF

SEQ ID NO: 734 - protein, 260 aa, Pelodictyon phaeoclathratiforme
GVDRESLQAFETKLKDNLYKVWNRLSSGSYFPPPVRGVGIPKKSGGVRMLGVPTVADRVAQSVVKMVLEPILEPVFHEDSYGYRPGRSAHDAIAVVRKRNWEYDWVVEFDIKGLFDNIDHELLMRALRKHCQTPWVFLYVERWLKAPMETPEGELIERTKGTPQGGVVSPLLANLFLHYAFDRWVSENLPGVPFCRYSDDGVLHCKSKIQAELVKRKIGERFRECGLELHPDKTQIVYCRDSNRKDEHPVNQFTFLGFTF

SEQ ID NO: 735 - protein, 260 aa, Pseudomonas putida
GIDDETIADFERNLPKNLYKLWNRMSSGSYFPPPVKAVEIPKASGGIRRLGVPTVSDRIAQTVVKLLIEPKLDALFHPDSYGYRPGRSAKQAIAITRERCWRYDWVVEFDIKAAFDHIDHELLMKAVRTHIKEDWILLYIERWLVAPFEAADGVRIQRERGTPQGGVISPMLMNLFMHYAFDAWMQRNSPNCPFARYADDAVVHCRSQRQAEHVMRSIASRLAVCGLTMHPEKSKIVYCKDSNRRAGYPHVSFTFLGFTF

SEQ ID NO: 736 - protein, 272 aa, Vibrio vulnificus
GVDGVTIEDFEKDLKNNLYKIWNRMSSGSYFPTPVAAVSIPKKSGGERVLGIPTVSDRVAQTVVRDKLEIMLEHHFLDDSYGYRVGKSAHDAIEVTRRRCWQYDWVLEFDIKGLFDNIRHDLLMKAVKKHVQLAEESQSRDYQWITLYIERWLVAPLQKADGTQTERELGTPQGGVVSPVLANLFLHYVFDKWLEKNYPDNPWCRYADDGLVHARTKPKAEKLRDELAKRFKECGLEMHPIKTKIVYCKDDIRRGSGKHIEHKQFDFLGYTF

SEQ ID NO: 737 - protein, 260 aa, Methylocystis sp.
GVDGVTIEQFEKDLKGNLYKIWNRMSSGAYFPPPVRAVSIPKKSGGQRILGVPTVADRVAQTVVKEIIEPALDAIFLADSYGYRPDKSALDAVGVTRERCWKFDWVLEFDIKGLFDNIDHTLLMRAVRKHVACPWALLYIERWLTAPMMQEDGTLIERTRGTPQGGVVSPVLANLFMHYTFDLWMARTFPHLRWCRYADDGLVHCRSEREARIVWEALASRMAECRLELHPTKTKIVYCKDDRRKANFENVAFDFLGYCF

SEQ ID NO: 738 - protein, 259 aa, Sinorhizobium meliloti
GVDGQTLEIFEKDLAANLYKIWNRMSSGTYFPPPVRAVSIPKKAGGERVLGVPTVSDRIAQMVVKQMIEPDLDSLFLPDSYGYRPGKSALDAVGVTRQRCWKYDWVLEFDIKGLFDNLPHDLLLKAVRKDVKCNWALLYIERWLTAPMEKNGEVIERSRGTPQGGVVSPILANLFLHYAFDLWMTRTHPDLPWCRYADDGLVHCQSEQQAEALRVELSSRLAACGLQMHPTKTKIVYCKDQRRREAYPNVTFDFLGYQF

SEQ ID NO: 739 - protein, 259 aa, Sinorhizobium meliloti
GVDGQTIEQFEADLKGNLYKIWNRMSSGSYFPPPVRAVPIPKKTGGQRILGVPTVSDRIAQMVVKQLIEPELDQIFLKDSYGYRPNKSALDAVGITRQRCWKYDWVLEFDIKGLFDNISHELLLKAVRKHVKCKWALLYIERWLTAPMEQDEQRIERDCGTPQGGVISPILSNLFLHYAFDLWMDRTHPDLPWCRYADDGLVHCRSEQEAEAVKAALQARLAECQLEMHPTKTKIVYCRDSKRRGQHPNVTFDFLGYCF

SEQ ID NO: 740 - protein, 260 aa, Escherichia coli
GIDKQSLADFDKRLVDNLYKIWNRLSSGSYFPPAVKAVAIPKKLGGERILGIPTVSDRIAQTVVKLAFEPQVEPHFLADSYGYRPNKSALDAIGVTRKRCWYYDWVLEFDIKGLFDNIPHELIMKAVDKHNPARWVKLYIQRWLTAPMVMSDGEVRARTMGTPQGGVISPLLANLFMHYVFDKWLAKYYPKVPWYRYADDGILHCHSEAEATEMREVLRKRFSECGLEMHPEKTRVIYCKDGSRKGDYEHTMFDFLGYTF

SEQ ID NO: 741 - protein, 260 aa, Methanosarcina acetivorans
GVDDENIAAFESDLTNNLYKIWNRMSSGCYFPPSVKAIEIPKKSGGTRILGIPTVLDRVAQMVTKIYLEPQLEPLFHPDSYGYRPGKSAADALAATRKRCWRYNWLLEFDIKGLFDNINHDLLMKQVSMHTDKPWIILYIQRWLKAPFQMADGTVNERTKGTPQGGVVSPLLANLFLHYAFDQWMDSHHRYNPFERYADDSVIHCRSREEAERLWIELDKRLSEFGLELHPSKTRIVYCKDDDRQGDYPETKFDFLGYTF

SEQ ID NO: 742 - protein, 259 aa, Bacillus pseudofirmus
GIDEQSIDEFERNLKDNLYKVWNRMSSGSYIPPAVKAVEIPKKAGGIRTLGIPTVADRIAQMTVKLYFEPLVEPFFHEDSYGYRPKKSAIQAIETTRKRCWKYNWVLEFDIKGLFDNIDHELLMRAVDKHTDIEWVKLYIKRWLTAPFQTKEGIKERTSGTPQGGVISPVLANLFLHYAFDKWMAINHPRNPFARYADDAVIHCKTEEEAKRVLESLNQRMNECKLELHPSKTKIVYCKDADRREDHKNITFDFLGYTF

SEQ ID NO: 743 - protein, 260 aa, Mesotoga prima
GIDEVSLEEFEADLDNNLYKIWNRMTSGSYFPPPVKAIEIEKKSGGKRVLGIPTVGDRVAQMVAKIYLNPLVDPYFHKDSYGYREGKSAIDALEVTRQRCWRYDWVLEFDIKGLFDNIDHELLMRAVKKHVKIPWLILYIERWLKAPFIQANGRVEERSKGTPQGGVISPVLANLFMHYAFDKWMERTHPDKPFARYADDGVIHCRTLEEARLLLESLKERMEECKLKLHPEKTRIVYCKDDKRKGEYPNTSFDFLGYTF

SEQ ID NO: 744 - protein, 250 aa, Alkaliphilus oremlandii
CGIDGETVFNFHLNLELNIEFLHDKLKTNGYEPSPVRRVEIQKPDGGVRLLGIPTVKDRVVQQAIVNIIEPIFDKTFHPSSYGYRPNHSQHGAVAKAERFMNKYGLEHVVDMDLSKCFDTLDHEIMMKAVSERISDGRVLKLIEKFLKAGVMHSDNFSRTEVGSPQGGVISPLLSNIYLNQFDQRMMSKGIRIVRFADDILIFAKDKKTAGNYKAYATQVLENELKLKVNNEKTKLTNVNEGVEFLGFVI

SEQ ID NO: 745 - protein, 249 aa, Desulfotalea psychrophila
GIDGQSVKDFAESLDVNLDRLLTELREKSYQPQPVRRVEIPKENGGIRLLGIPAVRDRVVQQALLDILQPIFDPDFHPSSYGYRPGRSCHQAITKATMFIRKYDRKWVVDMDLSKCFDTLDHDLILSSLSRRIKDGSILGLLKKILKSGVMTDEGWQASEVGSPQGGVISPLIANIYLDQFDQFMKKRGHRIVRYADDILILCSSKSAAKNALLQASCFLEKGLLLTVNREKTHICHSWSGVAFLGVSI

SEQ ID NO: 746 - protein, 273 aa, Intrasporangium calvum
GVDGVTVRQIRQRGEVGVFLAGIAASLRDGTYRPAPVRRVLIPKPGGKSRPLGIPTVTDRVVQQSLRMVLEPIFEADFLPVSYGFRPKRRAHDAVAEIHFYAGRGYRWVLDADIEGCFDHIDHTALLGLVRERIKDKKTVALVRAFLKAGVLSDLGLEAAAGEGTPQGGIISPLLANIALSVLDEAIMAPWAQGGDQSTQTGRAKRRYHGLGNWRIVRYADDFVIMTNGSRDDVLALKEQAAEVLARVGLRLSESKTRVTHLSEGIDFLGFHI

SEQ ID NO: 747 - protein, 273 aa, Frankia sp.
GVDGRTAASIVARIGIPEYLDGLRSALKDRSFRPLPVRERMIPKAGGKLRRLGIATITDRVVQASLKLALEPIFEADFLPCSYGFRPMRRAHDAVAEIRYLTSKPRCYEWIVEGDIKACFDEISHTSLTGRVRARIGDRRVLALVKAFLKSGILVEDRLVRPTTAGTPQGSILSPLLSNVALSVLDEHVARSPGGPGTGKTEKAKRLRHGLPNFKLVRYADDWCLVIKGTKADAEALREEIAGVLSTMGLRLSREKTLITHIDDGLDFLGWRI

SEQ ID NO: 748 - protein, 270 aa, Catenulispora acidiphila
GIDGRTVSRIEGQGVEEFLAGLRESLKSGEFWPVPVKERMIPKANGKLRRLGIPTVADRVVQAALKLVLEPIFEVDFEPCSYGFRPNRRAHDAIAEIHHYASRGYEWVLEGDIEACFDNIDHTALMGRVRERVGDKRVLRLIKAFLKSGIFSEGRAVRDTRTGTPQGGILSPLLANVALAVLDEHFAQVWQETGRTWAARDWHRRRGGATFKLVRYADDFVILAYGSRQHVEDLTADVAQVLSTVGLRLSPTKTAVAHIDEGFDFLGFRI

SEQ ID NO: 749 - protein, 271 aa, Brevibacterium linens
GVDGVAPRSLLHGQAVEVLTMIRRQVKTGEFRPLPVRERRIPKSNGKTRSLGIPTLADRVVQASLKLVLEPIFEADFYPSSYGFRPRRRAQDAIAEIHKFTSRPLNYEWVFEADITACFDEIDHTGLIQRLRGRITDKRVLALVRRFLKAGILSEDGVNRNTHTGTPQGGILSPLLANIALSGLDDHFQKKWESLGPSWTRAKLRRRGIPVMKLIRYADDFVVLVHGSVEHVEALWHEVAEVLAPMGLRLSVEKTKVTHIDEGFDFLGWRI

SEQ ID NO: 750 - protein, 261 aa, Bradyrhizobium japonicum
GADGITFAQIETEGRERWLENVRQELTAGDYRPQPLLRVWIPKSNGGRRPLSIPTVKDRTVMTAAMLVIGAIFEADLLENQYGFRPKVDAKMAVRRVFWHIRDHRRSEIVDADLRDYFTSIPHAPLMKCLTRRIADGRLLSMIKGWLTVAVIEKDGRRITRTAEARTKKRGTPQGSPLSPLLANLYFRRFLLAWRHGHQDQLDAHIVNYADDFVICCRPGSSETAMARMQTLMNRLGLEVNDTKTRLARVPESVTFLGYTI

SEQ ID NO: 751 - protein, 265 aa, Solibacter usitatus
GVDGVTIEEIMKTDQGVAGFLEGIENSLRRKTYRPEAVQRVYIEKENGKLRPLGIPTVRDRVVQMATLLILEPIFEADFLDCSYGFRPGRSAHQALEEIRGHVEAGYQAVYDADLKGYFDSIPHTQLLACVRMRVVDRSVLKLIRMWLEAPVVEREEGGGGSKWSRPEKGTPQGGVASPLLANLYLHWFDALFYGPEGPGGKADAKLVRYADDFVVMAKQMGTETIEFIESRLEGKFQLEINREKTRVVDLREEGASLDFLSHTF

SEQ ID NO: 752 - protein, 261 aa, Geobacter uraniireducens
FGVDGVSIESIEVRADGISGYLDEIQESLRTKNYKPSPVRRVYITKPNGKLRPLGIPCVRDRIVQAAVLLILEPIFEVDFLDCSHGFRPKRRPHGALDQVGNNLQLGRQEVYDADLSSYFDSIPHEHLIVELERRIADRSVLKLIRQWLHSPVREEDGSISRPKQGTPQGGVISPLLANIYLHRLDRAFHEEADSPYHFARARMVRFADDFVVMARHMGNRITGWLEEKLETDLGLSINRDKTGIVRMNKKESLNFLGFTL

SEQ ID NO: 753 - protein, 247 aa, unidentified
  source 1..247: note = uncultured_archaeon
GIDDVTIDEFERNLEQNLNEIQRLLRQDRYVPKPVKRVYIPKPDGKQRPLGIPTIRDRVVQQALKNVIEPIFEAEFLDSSFGYRPGKSAKQAIEQIETVRDEGHEWVVDADIKAFFDTVNHEKLIDAVAERISDGRVLGLIRAFLEADIMEQGQGRAKNVVGTPQGGVISPLLANIYLHYFDERMALGFEVVRYADDVLVLCGSEEEAEEAISHVKEILEELELTLHPQKTKIKNFSEGVDFLGFTV

SEQ ID NO: 754 - protein, 171 aa, unidentified
  source 1..171: note = uncultured_archaeon
GVDNQTLDDIREEGIEQLLEQIQHELKTGTYRASCVRRVFIPKSSGKLRPLGIPTVKDRIVQQAVKLIIEPIFEADFLEFSYGYRPNRSAKDASLEIYKWLNYGLTNIVDVDIEGFFDHIDHELLLKFVKERVTDGYILSLIKQWLKAGIVYGKSVTNPTEGTPQGVSFLR

SEQ ID NO: 755 - protein, 255 aa, unidentified
  source 1..255: note = uncultured_archaeon
GVDGETIEDIENRGVDQFLTEIQQQLRMKTYRIPKVKRVFIPKGDGKLRPLGIPTIRDRVVQQAVKSIIEPIFEADFKDCSFGYRPGRSAMQASEKIRHLLNLGYTNIVDMDIKGFFDHIDHEKMVFSVMKRITDPYVIKLIREWLRAGIVFQGNTSYPEQGTPQGGVISPLLANIYLNELDSLWTRRGMESPLKHSAHLVRYADDLLALTNKDPQAVAETLERIISLLGLEPNREKSSVITAEDGFDFLGFHFI

SEQ ID NO: 756 - protein, 262 aa, Acidithiobacillus ferrivorans
GVDGERFEDVEAYGVERWIGELAETLRKKMYQPQAVKRVYIPKPGGKMRPLGIPTLRDRVVQTATMMVIEPIFEADLQPEQYAYRAGRNALTAVREVHSLLKTGHKQVVDADLSSYFDTIPHAELMKSVARRIVDRHLLHLIKMWLDAPVEEGDGRGNMQRTTVNRDQGRGTPQGAPISPLLSSLYMRRFILGWKQRGYEERFGSRIVCYADDLVICCRWQAEQAMAAMQDMMGRLKLTVNAEKTRICRVPEAYFDFLGYTF

SEQ ID NO: 757 - protein, 263 aa, Dechloromonas aromatica
GVDRQDFEDVEAYGVRRWLEELALALKEESYRPDPIRRVFIPKANGKLRPLGISTLHDRVCMTAAMLVLEPIFEADLPDEQYAYRPGRNAQQAAEEVKNRLYLGQTDVVDADLSDYFGSIPHSELMKSLARRIVDRRVLHLIKMWLECAVEETDQRGRKKRTTEAKDQGRGIPQGSPISPLLSNLYMRRFVLAWKKLGLERSLGSRIVTYADDLVILCKCGKAEEALQWMRTIMGKLKLTVNEEKTRICQVPAGTFDFLGYSF

SEQ ID NO: 758 - protein, 263 aa, Burkholderia sp.
GVDRQDFAEVEAYGVQKWLGELALALRLETYRPDSIRRVFIPKANGKLRPLGISTLRDRVCMTAAMLVLEPIFEADLPPEQYAYRPGRNAQQAVIEVEERLHRGQTDVVDADLADYFGSIPHAEMMLSLARRIVDRRVLHLIKMWLECPVEETDDRGRQKRTTEARDSRRGIPQGSPISPLLANVYMRRFVLAWKKLGLQRSLGSRIVTYADDLVILCKKGKAEEALLNLRQIMGKLKLTVNEEKTRICKVPEGEFDFLGFTF

SEQ ID NO: 759 - protein, 261 aa, Bradyrhizobium japonicum
GVDGITFEQIDASGLEAWLAGLRDELVTKTYRPDPVRRVMIPKPGGGERPLGIPTIRDRVVQAAAKIVLEPIFEADFEDGAYGYRPRRNAVDAVKEVHRLMCRGYTDVVDADLSKYFDTIPHSDLLKSVARRIVDRNVLRLIKLWLRVPVEERDSNGKRRMSGGKSNKCGTPQGGVISPLLSVIYMNRFLKHWRLSGRCEAFHGQIISYADDFVILSRGHAEDALTWTKAVMTKLGLTLNETKTSVKNARLESFDFLGYTL

SEQ ID NO: 760 - protein, 261 aa, Nitrobacter hamburgensis
GVDGMTFGQIEGAGVDAWLAGLREDLVSKTYQPDPVRRVMIPKPGGGERPLGIPTIRDRVVQAAAKIVLEPIFEAGFEDSAYGYRPRRSAIDAVKETHRLLCRGYTDVVDADLSKYFDTIPHADLLRSVARRVLDRNVLRLIKLWLQVPVEERDGDGKRHMSGGKSSTRGTPQGGVASPLLSVIYMNRFLKHWRLTGRGEVFHAHVISYADDFVILSRGHAEEALTWTRAVMTKLGLTLNEAKTSVKNARREGFDFLGYTL

SEQ ID NO: 761 - protein, 253 aa, Streptococcus agalactiae
GIDDFTIEEIEAYGVQKFLDEIEDQLRNKKYQPKAVKRVYIPKANGKKRPLGIPTVRDRVVQTAVKIVIEPIFEADFQEFSYGFRPKRSANQAIREIYKYLNYGCEWVIDADLKGYFDTIPHDKLLLLVKERVTDKSIIKLLSLWLEAGIMEDNQVRSNILGTPQGGVISPLLANIYLNALDRYWKNNRLEGRGHDAHLIRYADDFVILCSNNPKKYYQYAKQRIDKLGLTLNEEKTRIVHATEGFDFLGYTL

SEQ ID NO: 762 - protein, 264 aa, Geobacter sp.
GIDGVTFEAVEEKEGVSAFIAELEDALRNKTYQPDPVKRVMIPKSDGSQRPLGIPTIRDRVAQMAVKLVIEPIFEADFCESSYGFRPKRSAHDAVDDVAYSMNTGYTEVIDADLSKYFDTIPHANLMAVIAERICDGAILHLIQMWLKAPIMEVDKDGTKRNIGGGKGNRKGTPQGGVISPLLANLYLHILDRIWERGNLQQRLGARIVRYADDIVILCRRAKADKAMATLRYVLERLGLSLNEAKTTTVNAYKDKFDFLGFTI

SEQ ID NO: 763 - protein, 262 aa, Thiorhodococcus drewsii
GIDGVTFTAIEAGIGKDAYVAALREELEQKTYRADGVRRVWIPKPDGSERPLGIPTIRDRIVQMAFKLVVEPIFEADFCEHSYGFRPQRSAHDAIDAIAEALLRGHTQVIDADLSKYFDTIPHAKLMGVIAERLVDGPVLGLIRQWLKAPVIEEDERGQHRPTGGKGNRRGTPQGGVASPLLANLYLHLLDRIWVRHDLERRLGARLVRYADDAVILCRHSTEKPMAVFTAVLEKLDLTLNVQKTHVVDARADGFEFLGFRI

SEQ ID NO: 764 - protein, 263 aa, Thiocystis violascens
GSDGVSFEAIEQGEGVEGFLKGLAEELREKRYRAQPVRRAMIPKGDGRERPLGIPTIRDRVVQMAVKLVIEPIFEADFTPHSYGFRPQRSAHDAIDDIANALWAGHTHVIDADLSSYFDTIPHANLMTVVAERMTDGAILALLKQWLKAPIIGVDDQGKRRTVGGGKANRVGTPQGGVISPLLSNLYLHLLDRIWDRHRLKDKLGAHIVRYADDFVVLCKQGVEEPLKVVRHVTDRLGLTLNETKTHVVDAKETGFHFLGFTL

SEQ ID NO: 765 - protein, 260 aa, Porphyromonas gingivicanis
QCDTSLYQTWLSSIAQDTHSPLKKAELENLLEALHSLSYIPSVAHAIHIPKSDGSYRTLSIPSPIDLYLQRNLINVLYPIIDKTNSPQSYAYRKGKGALEAIKQVELLKRKLGKKYYVVRCDIDNFFDSIPIEQLMGMFQNITRDPLLSRMVRLWIKSGVVDNKSHFHPHLQGLPQGSPLSPLLSNFYLTDTDRYISNNITEYFIRYADDILLFIPEHSDPLSSLQALSNHLKNQKKLSLNKDFIVTEINSEFSFLGISF

SEQ ID NO: 766 - protein, 259 aa, Porphyromonas gulae
VNDALYRKWLSSLAADRDLPMAEAERQDLLEALRVCSYIPQPYHSVNIPKGDGSYRQLHIPSAVDLHLQRSLAGILYPITESLSIAQSYAYRKGKGAVAAIRKVQHLLDSLDENYTVVRCDIDNFFDSIPVPSLLQKVLRTTEDPLLTRMLSLWMKSGVVDRTQQYTPASSGIPQGSPLAPLLSNLYLEDTDRYIAGHITTEFIRYADDLLLFLPERADPLKALQDLSEHLKYRKGLKLNRDFVVSSIKSSFSFLGITF

SEQ ID NO: 767 - protein, 253 aa, Porphyromonas gingivalis
RKWLSSLAADRDLPMAEAERQDLLEALRICSYIPQPYHSVNIPKGDGSYRQLHIPSAVDLHLQRSLAGILYPITESLSIAQSYAYRKGKGAVAAVRRVQHLLDSLDENHTVVRCDIDNFFDSIPVPSLLQKVQRTTEDPFLTRMLSLWMKSGVVDRKQQYARASSGIPQGSPLAPLLSNLYLEDTDRYIAGHITTEFIRYADDLLLFLPEKVDPLNALQDLSEHLKYRKGLKLNRDFVVSSIKSSFSFLGITF

SEQ ID NO: 768 - protein, 257 aa, Porphyromonas gingivalis
DTLYRKWLSSLAADRDLPMAETERQDLLEALRICSYIPQPYHSVNIPKGDGSYRQLHIPSAVDLHLQRSLAGILYPITESLSIAQSYAYRKGKGAVAAVRRVQHLLDSLDENYTVVRCDIDNFFDSIPVPSLLQKVQRTTEDPLLTRMLSLWMKSGVVDRKQQYAPASSGIPQGSPLALLLSNLYLEDTDRYIAGHITTEFIRYADDLLLFLPEKVDPLNALQDLSEHLKYRKGLKLNRDFVVSSIKSSFSFLGITF

SEQ ID NO: 769 - protein, 265 aa, Psychrobacter lutiphocae
AIEEVLERHELEPVVDDKGRIMQVDALTELIYTQLSTGVYAPKPTRAIFVPKPKGGKRCIEELEQVDMMVHRLVFNSIAKTIESYQSPLSLGYRKGYSRQMARDKVQALIDSGFGWVVEADIESFFDNVPFERLWQRLATILPQRELQTIALIKKLMQVGYTVSNASGTVVKEHLRFKGLMQGSPLSPVLANLYLAMLDEQINAEHFAFVRYADDVLMFCRSEADANTTLAWLDQHLSELGLNLSLSKTAITAVNNGFEFLGYRF

SEQ ID NO: 770 - protein, 256 aa, Desulfovibrio bastinii
GAAASRLDRDNDFSASLERDYGSIGNAVFAMRDHILNGEFQCSPAAPFEINKPLGGRRTLGTFSSEDSLAQKLLHRLLSPVLDRMFEHSSVGFRKGRSREDAKRMIQQAIRQGCRYVFESDIDSFFDDIDRSTMLRKLRGVLPQADKMTFRALESCINAGLENEVDSTKGLVQGSSLSPLLSNLYLDSVDERMDEHGYRFIRYADDFVVLAHSEDEWRKACEDMQDSLEPLGLQLKEGKTHISCIDPGFKFLGIEL

SEQ ID NO: 771 - protein, 257 aa, Desulfovibrio hydrothermalis
GAAASKINRDSDLSSELERDYGSIEKAVFEMRDRILMGEFTCSAAVPFEMHKPYGGSRIIGTCPPEDTLTQKLLHQLLSPVMDRMFEHSSVGFRKGRSREDAKRMIRQAIREGCRYVFESDIDSFFDEIDRPTMLRKLQDALPQADHMTFKALKSCVNAGLVDEDRQDAKGLVQGSSLSPLLSNLYLDGVDERMEELGYRFIRYADDFVVLARSKEECRKAYEDMRLTLAPLGLSLKEQKTRISNIDPGFRFLGIDL

SEQ ID NO: 772 - protein, 252 aa, Accumulibacter sp.
DLAVRLSNTPQAPDLHELAVELAQNLREGAAPLPFQAIRVPRSDGRLRQFETPAARDLVILNHLTRLLSEPFDRLFSVHSIGYRKGHSREDAVERVRAAIAEGCTHVLESDISDFFPSVDLKRLLARLDDVLPRRDVRLRQTLAAYLGAGWRYGEGSVQARNRGLPLGSPLSPLLANLYLDSFDSQLGATVPGVRLIRYADDFIILTESEAAARALLDTARDAAAALGLALNLEKTAIRPLSDGFDFLGIRF

SEQ ID NO: 773 - protein, 220 aa, Smithella sp.
YTPAPNTAFLIKKKSGVDRMVEQIALKDLILQQYLLKTIGNEFERIFEPESIGFRKGISRQRAVEMVQAALKAGYQFIIESDVDDFFPSVDLKILTGLLDRYLPQEDHRIKELLTKTIHNGYVLNGQYHERVRGVAQGSPLSPMLANLYLDYFDETIKGWPVRLIRYADDFIILTRTKEEAEEYLSRTESCLSEIGLKIKKEKTGIKHIREGFRFLGIKF

SEQ ID NO: 774 - protein, 279 aa, Brocadia fulgida
ALQALSETEKYPFDENQYAENLFQLIVSNGYLPTPHIAFTIKKKSGVDRVVEQLSFRDLIVQQYLLKVISTVFDRFFEAESIGFRKGVSRQRSIGMIQSAIAEGYQCVIESDIEDFFPSVDLDILEHLLDCSIPQNDVCLKNILLKLIRNGFILNGTYYERRKGLAQGGPLSPILANLYLDSFDEQIKRWGLASHDEDAGTDHAKGGAGNKTAGGNASRGVKLIRYADDFIILTRTKEEAEGVLSDTESYLSTLGLKIKKEKTAIRSLRDGFHFLGIRF

SEQ ID NO: 775 - protein, 230 aa, Brocadia sinica
MVEQIPFRDLIVQQYLLKIISAPFDRFFEAESIGFRRGVSRQRSIEIIQAAIAEGYQYVIESDIEDFFPSVDLNILAHLLDSYIPQNDSCLKKILLKFIKNGYILNGVYHERVKGLAQGSPLSPILANLYLDSFDEQIKQWGLLSPDEHGETASDSKDTPSRAAPAHTPRGVKLVRYADDFIILTKTKKDAEDVLSETEAYLSKLGLKIKKEKTAIRSMKDGFQFLGIRF

SEQ ID NO: 776 - protein, 247 aa, Actinomyces sp.
GLLQRQTRLIAGDLDRFLAELSASLRGGTYLPAPLLRADIPKRAPGQTRVLHIPTIRDRVVERAVVNAVAHDADRIMSPCSFAYRTGIGTDDAVHHLATLRDDGYRHVLRTDVEDYFPNLDVEDALTVLAPVVGCPRTIDLIRLIARPRRARGERRTRSRGIAQGSCLSPLLANLVLNDVDHALNDAGYGYARFADDIVVCAPARDDLLAARELLGSLVAAHGLNLNEEKTAMTTFDEGFCFLGVDF

SEQ ID NO: 777 - protein, 247 aa, Actinomyces cardiffensis
GVLQRQSKRIIENADEFLNQLSALLRNGTYEPEPLNRVDIPKGEHGKTRTLNIPTIHDRIVERAIVDTIAFTADLVQSSCSFAYRTGIGVDDAVHHVATLREEGYQYVLRTDIEDFFPHVNLEHALEALPESLQERDLLALLRIVALPRRAHGQRRARSRGVAQGSTLSPLLANLSLTRFDHDICDAGYGYARFADDIVVCSPREQDILDAIELLSDLAAAHGLKLNQDKTIMTTFDEGFCYLGVDF

SEQ ID NO: 778 - protein, 145 aa, Nocardiopsis potens
MRADIADCFEQIPRWPVVTRVKELVPDAEPCLLIQHLIARDATGPAARRVWSGRRRSRGLYQGSALSPALADLYLGAFGKAMLWAGRQVLRYADDFAIPAGSRTEAESALTTAEDVPAEWGPELNGAKSRIVSFDEGVDFLGRTV

SEQ ID NO: 779 - protein, 250 aa, Nocardiopsis baichengensis
GVKSTAVQEFEKGALRRLLDISEQLREGTYAPEPVTAFEVPKPSGEARLLGIGTVGDRVVERAVLAVIEPCIDPVLLPWSFAYRKGLGVPDAVQALAEARESGSTWVLRADFADCFETIPRWPVITRLHELVPDAELCLLVQHFIQRKSRGPGARRLRPGSGRGLHQGSALSPLLSNLYLDSFDRALLQRGRQVLRYGDDFAVPSESRHAAEQALAQATEAAREWGLELNAAKSQIVSFDEGVRFLGRTV

SEQ ID NO: 780 - protein, 248 aa, Frankia sp.
GQPDSEVDAFEANAARNLDELGTVLAAGEWQASPVRRVDLPKPSGGVRVLGVPRLVDRIVERALLRVLDPVIDPLLLPWSFAYRRGLGARDALAALAEARDSGMTWVARSDIRDCFPSIPQWEVLRRLREVVDDERIIHLVGVLLDRPVAGGRTDPKNRGLGLHQGSALSPLLSNLYLNAFDRAMLRAGFRVIRYSDDFAIPTTGRVAAEQALVSASTELEDLRLEINSGKSHVVSFDEGVRFLGEVT

SEQ ID NO: 781 - protein, 211 aa, Micromono sporarosaria
MTRVSIPKPDGGIRSLAIGAIEDRIVERAVLDVLDPVVDPTLSPWSFAYRRGLGVRDAVRALAEARESGLAFVVRCDIDDCFDSIPRWPLLRRLRELVSDAELVALVERLVGRPVTGERASGGRGLHQGGSLSPLLANLYLDTFDRALMRHGHRVVRYGDDIAISVPDRPTGLRVLDLADAEAEALSLRLNTDDRQVIAFDEGVPFCGQVV

SEQ ID NO: 782 - protein, 243 aa, Cellulomonas bogoriensis
GRVPVSVRRFERGVAASLVRLSGELSSGRYQPSRVSEVSLRTGSGSERVLRIGAVVDRVVERSLLNALTPVIDPLLSPFAFGFRRGLGVKDAVAALARARDEGSTHVLRSDIAAAFDSVPRARAVQALSRLVPDRRVCDVVASLLARLDDYGLEGVGIAQGSAVSPLLLNLYLLPFDEALMANGFTPLRYADDIAVPAMSESQAQSAAQDVAHQLECLGLACSAPKTSIRSFDEGVHFLGVTL

SEQ ID NO: 783 - protein, 246 aa, Corynebacterium durum
GNLAPSILKFQEDAEEKILRLSEALLDGSYKPYQFTEVDIETNGKERTLHIPAVQDRIVARAILATTTSRIDPLLGASAFGYRPGLGVADAVQAVVDAREAGLKWVLRTDVDDCFPSLSPDIAFDRFTQAVHDTDITDVVEQLLGRTVGNGKMRGTTLPGLPLGCPLSPVLMNLVLVDLDDALNAAGFTVVRYADDIVVVGESKEELEDAARFCQRILRSFNMQLGDDKTDIMTFDDGFAFLGEDF

SEQ ID NO: 784 - protein, 177 aa, Nakamurella multipartita
MAVLVPGPTRPDLPGQGVKVDQWSYTTLVDLTEGLRWVCRCDIDNCFPSIPKDRLRRKLTALFQGDPTLLGILTRLLARPAGGSPAEALPGLPQGSPLSPLWANLILADFDDAVARTGFPLVRYSDDMVIAAADRAEAWEAMRVAHDAAAGIEMSLGADKSAVMSFDEGFTFLGEDF

SEQ ID NO: 785 - protein, 193 aa, Propionicicella superfundia
MPDRIVARAILDTATPFVDPELGHCAFAYRPGLGVADAVQAIARQREEGLGWVLRTDIDECFPTLPVDLAHRRLAALVDDDDLASVLTALSARPYRTATRALRAVTGLPQGCPLSPVLANLVLVDVDRALLDRGYAPVRYGDDIAIPCANEDDAWEAARVTSEAAERLDMSLGSDKTHAMSFTEGFVFLGEEF

SEQ ID NO: 786 - protein, 248 aa, Kutzneria sp.
DQLSAGVRTFGDEADQRLAGLAEQLAGGMYLPGVLTELVMVTEDGGQRVLRVPAVRDRVVERALLSVLSPRLDPLLGPASFGFRPGLGVVDAVQALARLRDEGFGWVLRTDLHDCFPSVDLRRVRRLLEVLTSDGDLLGVLDLLLARAARRPGEQTLRPAHGLPQGSSLSPLLANLVLEDFDDRMRHAGFPLVRYADDIAVLASSEREAWEAARVASAAAKEIGMTLGADKTEIMSFDGGFCFLGEDF

SEQ ID NO: 787 - protein, 241 aa, Microlunatus phosphovorus
GVERFAEDPKAELDELGEQLRTGTYRPRDLTEVVIDDGGGSRTLHIPAVRDRVVERSLLNVVTPWVDPVLGFTSYAYRPGLGVADAVQALVTLRSEGLGWVLRTDVDDCFPSVPVDHARRLLGALVPDADLLAIVDLLLARAAVRPGRGRGVMRGLAQGCALSPLLTNLVLTALDDALLDEGFAVLRYADDICVATETRDDAWEAARIATAALEVLGMELGADKTEVMSFDEGFSFLGEDF

SEQ ID NO: 788 - protein, 239 aa, Pirellula staleyi
ALDQAASKWDLGGGEVQSAARDLVKGTYQPQPCFRLDIPKSNGDRRQLAIPSRLDRVLQRSILDVIAPALELFFEESSFAYRRGLGRHTAARHLSQAFTDGYRWALHADFFDFFDTIDHKLLRRRLAAYLADPSLVEVIMRWVETGAPHPDHGIPTGAPLSPILANLFLDQFDEAMHSVGRRLVRYADDFVVLFRDQSEAQAVISEVRQAAESLRLELNRDKTHTLHLATSFDFLGLHF

SEQ ID NO: 789 - protein, 249 aa, Thiomicrospira sp.
IEKKPTIDKLTERTHSQINSALGQIIKQDYNAPAMQGFTIPKKDGSERLLAVSPLYDRVLQKAAAIILTPGLDALMAQGSYGYRKGLSRQQVRYEIQNAYRQGYHWVYESDIEDFFDAVNRKQLLNRLQSLFGKDPIWKQLEDWLGQEIHYQETIVERTPHTGLPQGSPLSPVLANFVLDDFDSDMELHGFKMIRFADDFIILCKSRHEAELAALGVQHSLKQVSLDINRDKTHIVELSQGFRFLGYLF

SEQ ID NO: 790 - protein, 247 aa, Marinomonas mediterranea
DTDEEHHDAIDELLTKLYVSRERIFKREFTPSQLHSVEIEKPEGGTRLLSVPNWHDRTLQKAVTECLGNTLEHIWMKHSYGYRKGHSRLQARDQINQYIQQGYEWVLESDIESFFDSVNWLNLEQRLKLLLPNEPLVPLLMQWVSAAKQTEDEQTLARHNGLPQGAPISPILANLLLDDLDQDMIAKGHQIVRYADDFVLLFKSKAAAESALDDIITALKEHHLAINLEKTRIVEASQGFRYLGYLF

SEQ ID NO: 791 - protein, 245 aa, Teredinibacter turnerae
SFNITATEFRTTLYQQLAAIRACRYHPHPLVPVTIAKKDGTDRFLAVPPVGDRALQRVVTAQLSAELDPLFIQHSFGYRKGYSRQGARDAINQAIRAGYGWILESDIDSFFDSVAWSQMATRLRLFMGQDPLVDLIMQWLQTPVQETPAASAPAPRCAGLPQGAPISPLLANLLLDDFDQDMIVQGMKLVRFADDFVLLFKHQQQAQQALPRVVQSLAEHGLALKPEKTRIVSAQQGFRYLGYLF

SEQ ID NO: 792 - protein, 248 aa, Vibrio sinaloensis
SLDSQFSEQERNQYKNKVIGLSHTILAGDYKAPVLTQVEIDKSDGGVRTLSIPPLADRILQKAIARPLAVSLDGLWKTHSYGYRKDLSRHDAKFAINQAIQQGYEWVLESDVDSFFDNVDWRNLQTRLKLLLPNDFLVDVIMAWVKAPVKTPSGQILERTQGLPQGSPLSPLLANLVLDDFDADMLALDYKLIRYADDFVLLFKKQSEAQMALDHVIASLNEHGLNIKAKKTQIVHANKGFRYLGFWF

SEQ ID NO: 793 - protein, 248 aa, Vibrio metoecus
SLDNPLSEQQQREVLQSVMTGSECLIHQRYPVPTLQQVEIEKEEGGTRTLSIPPLIDRILQKAVARPLAASLEGLWKSHSYGYRSGLSRHDAKLAINQAIQNGYEWILESDVESFFDNVDWHNLETRLTLLLPNDALVDTIMAWVKAPIKTVTGEYQQRQQGLPQGSPLSPLLANLILDDFDADMLALDYQLVRYADDFVLLFKTEQQAQAALHRVIDSLNEHGLKIKAQKTHIVHAKTGFRYLGFWF

SEQ ID NO: 794 - protein, 242 aa, Photobacterium aphoticum
SETQKQHTLTQLRQQCAQLLEGTFTAPTLQQVDIDKDDGGTRTLSIPPWQDRVLQKAVASLLNEAFDPLWKHQSYGYRKGRSRFNAKDAINDAIRQGYEWALESDVDSFFDSVCWTNLAARLHLLFPSDPLVPVIMNWVKAPIRTPDGDEIPRTQGLPQGSPLSPLLANLILDDFDGDMLALDYQLVRYADDFVLLFTSQQQAQQALPHVIASLNEHGLTLKARKTHIVEAKKGFRYLGFLF

SEQ ID NO: 795 - protein, 255 aa, Teredinibacter turnerae
ECDLSQYECNEETDAEGDQAELPPTLLKRANALAQGRYDVPPLRGVIIPKTDGEWRALAVAPFFDAVLQRAVAQILAPSLDRVMDNRSYGYRRGRSRLDAKEQIQLAYRNGARWVLEADIEDFFDSVAFSLVAQRLRALFHQDPINEAILAWLSAPVDYDGLRLQRKAGLPQGSPLSPVLANLLLDDFDSDMRKAGFNCLRFADDFVVVCQSREEAERAWQRAASSLNEHGLFLAENKTRVISFERGFRFLGYLF

SEQ ID NO: 796 - protein, 261 aa, Thiohalocapsa sp.
GVEWIDADEQEPDAQDGAEAEADELAAPIEDLTRAIGHLQEGKYRVPELRGYLLPKRDGGLRPLAVPPLRDRVLQRAVQQTLGRGIEPLFSSGSHGYRPGHSRITAADAIRAAWAQGYRWVYESDVRDFFDSVDLQRLRERLEAIYGDDPVVAAVLGWMRAPVRFRGERIERRNGLPQGSPLSPLMANLMLDDFDSDMQAAGFRLIRFADDFIVLCKDPEEARRAGEAARASLAEQGLALHPDKTRITAMEDGFRYLGYLF

SEQ ID NO: 797 - protein, 252 aa, Thiohalocapsa sp.
PIDPDDPESMPDPEAEEALADRLEAIGERLRAMRYQAPALKGVVIRDPDGDLRALAIPPFWDRVAQRAVNDCITPACDLLMSEASHGYRRGRSRHTASLDINRAWQDGYRWVYEADIEDFFDSVDWDKLRLRLEALYRDDPVIDLILAWMAAVVDYQGFSVQRSMGLPQGAPLSPTMANLMLDDLDNDLEQAGFRLVRYADDFVVLCRDRAQAEAAGQEVRRSLAELGLQLNDAKSRVVSFQQGFRFLGFVF

SEQ ID NO: 798 - protein, 254 aa, Thiocapsa sp.
GGELWDTEYPEAPDPDEEEELADRLERLGKRLLEGDYRPPALRGVVYRDPDGDLRGLAIPPFWDRVAQRALVERIAPALEGVFSAASHGYRPGLSRHTASSAIQRAWREGYRWVYEADIEGFFDNLDWQRLAERLRALYRDDPAVDLLLAWMAAPVDYQGMRIERSRGLPQGAPLSPVLANLMLDDLDSDLEHAGFRLVRYADDFVVLCKDQERARAAGEAVRRSLAELGLILNESKSRSVSFEQGFRYLGFLF

SEQ ID NO: 799 - protein, 127 aa, Rhodobacter capsulatus
GQSIAAFAAKGAAAIARLSGLLRNGNYAPRPLRLHEIPKPDGGTRRLAIPAVSDRIVQTAVAAALTPGSSRCFPPTATATAPAVRWRWRWTGSRPCGGWATPGWSRPISKRPLTGSRMTRCSRRSIP

SEQ ID NO: 800 - protein, 249 aa, Photobacterium marinum
ESKKLPKKLHQSLPHEDFDQLYEQLHQGNYQTGLLTPRLLEKPGQKRRLLLLPPFIDKVAHKCLSRWLATSLDTLYSANSYGYRKGYSRLTAKDRISYLLSQGYKWVVDADIKAFFASIDRQQVAARLQALYGDDTLWPILDKMLNAAIDPNSELPLELSISGLNLGNSLSPILANLMLDHFDDVIREHKLELVRYADDFLILCREQQQANHAKDFVEQLLHSQALSLNPRKTRVTHVNKGFRFLGYLF

SEQ ID NO: 801 - protein, 246 aa, Vibrio sp.
DEQQALEQQRSDLPEMLQQVLHHDYWPAPLTPWLMQEQGRKERLILLAEFNDKVLHKTISLWLGASLDQLYSKTSYGYRKGYSRLSAKDRIINRIRAGYVYAVDADIRDFFPSVEQSRVLNRLSALYGADPLWTLVERFLSAPIRRQHLPAGYEDYERTGLDLGNSLSPVLANLMLDHLDAVMESLGYELIRYADDFLVLTKSRDKAQQALHMIEEILTAQGFALNHEKTRIRHFSEGIHFLGYLF

SEQ ID NO: 802 - protein, 247 aa, Oceanospirillum beijerinckii
TDEHKAWEQSRENLPDTLYRCWHLDYWPELLHPRLLQQAGKKERLLLLPPFPDKVIHKTISRWLSDSLDQLYSKSSYGYRKGYSRLGAKDRIIHLVRKGYKYALDADITDFFPSVNTNRILGRLAALYGQDPLWQLLERFLHCQIDRQNLPAGYEHHVNQGLNLGTSLSPVLANLMLDHLDSVLNNMDYELVRYADDFLVLCKHKQQAEDARVLIEQLLKQHDLQLNAEKTKVRSFASGIYFLGYLF

SEQ ID NO: 803 - protein, 247 aa, Phormidesmis priestleyi
GVDGITTDLFVGVANEQLAQMHRQLRREVYEASPAKGFYVPKKNGGQRLIALSTVRDRILQRYLLQSIYPRLEKAFTDSTFAYRPGLSIYGAVDRVMAIYAPQPTWVIKADIQQFFDNLSWGVLLSQLERLKVAPAQVRLIEQQLKAGLILQGQFYRPNKGVLQGGILSGALANLYLSEFDRLCQEAEIPLVRYGDDCVAVCHSYLQANRFLAMMQGWLEDIYLTLNPDKTRIVGPDEGFVFLGHMF

SEQ ID NO: 804 - protein, 247 aa, Leptolyngbya sp.
GVDGITVDLFKGIAQEQIRLLHQQMRQERYVASPAKGFYLPKKTGGDRLIGIPTVKDRIVQRYLLQGIYPHLENTFSEATFAYRPGLSIYTAVAQVMTRYRHQPAWVIKADIQQFFDRLSWPLLLHQLDQLPLPPVWMRWIEQQLKAGIVIRGHFQRPNQGVLQGSILSGALANLYLNDFDRRCLAADIDLVRYGDDCVAVCQSYLEATRSLALMQDWIEDLYLSLHPEKTQIIPPGEAFVFLGHRF

SEQ ID NO: 805 - protein, 247 aa, Microcystis aeruginosa
GIDGIPTDLFAGVVDEELSLLQRQLQQEYYQADPAKGFYRQKKSGGNRLIGIPTVRDRIVQRLLLHSIYPALEDVFSDRSYAYRPGLGVQSAIAHLSEVYAGQTVWTIKADVSRFFDSLNWALLLTRLERLSLEPVIVRMIEQQIKSGIVIDGQKLRQTKGVLQGGILSGALANLYLSDFDARCVGLNLDLVRYGDDFVIVTSGLLEATRVLDSLHHWLADIYLALQPEKTRIIAPDGEFTFLGYQF

SEQ ID NO: 806 - protein, 211 aa, Arthrospira platensis
MGFYRVKKSGGHRLIGIPTVRDRIVQRLLLRSLYPILEETFQDCSFAYRPGVGVKHAIERVAEVYSSQTWTIKADISQFFDSLCRTLLLSQLEELSVDQTVVRYIKGQLEAGIVVGGMPILSGRGVLQGGILSGALANLYLSEFDRRCLDAGAYLTRYGDDFVIVARSLLEATRFLNLIEDWLSDIYLTLQPEKTHIFAPGEEFVFLGYGF

SEQ ID NO: 807 - protein, 244 aa, Cyanothece sp.
GITTDLFAGVKKDELIRLQQELIEEIYQPYPARGFYLPKNNGDKRLLGIPAVRDRVVQRWLLEDLYLPLEEVFTDCSYAYRPGRGIQMAVKHLYYYYQIQPKWIIKSDIRSFFDSLNWSILLSILEHLKLDPIIQQLVEQQLKSGIVLKGRYFPRNQGVLQGAVLSGALANLYLSEFDRKCLEKGINLVRYGDDFVAACQSLGEAERTLNLITQWLERIYLQLHPKKTEIYAPDQEFTFLGYLF

SEQ ID NO: 808 - protein, 247 aa, Kamptonema sp.
GIDNITVDLFAGVARYQLQVLLWQLQQENYFPRPAKGFYLRKASGGKRLIGIPTVRDRIVQRFLLDELYWPLEDVFLDCSYAYRPGRGIQMAVKHLYSYYQFGQAWVIKADIEKFFDNLCWPLLLTDLEKLQFEPTLRQLIEQHLASGIVVKGQHFHPNQGVLQGGILSGALANLYLNEFDRLCLSHGFNLVRFGDDFAVACADSIQANRCLEQINSWLGSFYLKLQPEKTRIFAPDEEFTFLGYLF

SEQ ID NO: 809 - protein, 244 aa, Microcoleus sp.
GITTDLFAGVAKEQLYSLQRQLQQEHYAAHPALGFYLRKTRGGKRLIGIPVVLDRIVQRLLLEELYLPLEDTFLDCSYAYRPGRGIQMAVQHLESYYQFQPTWVIKADIAQFFDNLCHALLFTHLEQLQLEPIVLQLIEQQLKAGIVIKGQRLFPQKGVLQGAVLSGALANLYLTEFDRQCLSHGLNLVRYGDDFVVVAPDWIQANRALEQITTGLAQLYLTLQPEKTKIFAPDEEFTFLGYQF

SEQ ID NO: 810 - protein, 244 aa, Calothrix parietina
GISIGFFESMATEQLRNLVSQLQYGTYTASPAKGFYVPKKNGGKRLIGIPTVRDRIIQRLLLDELYFPLEDTFVDCSYAYRPGRNIQQAVQHLYRYYQYQPKWIIKADIVEFFDNICLALLLNALEKLRLEPNILQLIEQQIKSGIIINGQYQNAGKGLLQGGTLSGALANLYLTDFDQKCLNQGINLVRYGDDFVIACSNFAEANRVLDKITGWLGGVYLTLKAEKTEIFSPDDEFTFLGYRF

SEQ ID NO: 811 - protein, 244 aa, Nostoc sp.
GISVDLFESMATEQLQNIAYQLKEETYTANPAKGFYIPKKNGTKRLIGIHTVRDRIIQRLLLDELYFPLEDTFLDCSYAYRPGHSIQQAVQHLYGYYQYQPKWIIKADVADFFDNLSWALLLTYLEELSLEPSLLQLLEQQLKSGIIIAGQYRNFGKGVLQGGILSGALANLYLTSFDRKCLSQGINLVRYGDDFVIACNSWLEANRILDKITGWLGEVYLTLQPEKTQIFTPNDEFTFLGYRF

SEQ ID NO: 812 - protein, 244 aa, Calothrix sp.
GISVELFESMATEQLQNIANQLYDETYTASPAKGFYIPKKNGSKRLIGIPTVRDRIIQRLLLDELYFPLEDTFLDCSYAYRPGHNIHQAVQHLYGYYQYQPKWIIKTDIADFFDNLSWALLLTALDELSLEPIVLCLLEQQLHSGIIIAGQYRNFGKGVLQGGILSGALANLYLTNFDRKCLSQSINLVRYGDDFVIACNSWQEANRILDKITTWLGEVYLTLQPEKTQIFTPNEEFTFLGYRF

SEQ ID NO: 813 - protein, 247 aa, Scytonema hofmannii
GVDGISLDLFESVAAEQLRNIEYQLHHETYTASPAKGFYVPKKNGDKRLIGIPTVRDRIVQRLLLEELYFPLEDTFLDCSYAYRPGRNIQQAVQHLYSYYQLQPKWVIKADIAEFFDNLCWALLLTALEDLQLESIVLQLLEGQLKSGIVIAGKPVYPGKGVLQGGVLSGALANLYLTNFDRKCLSHGINLVRYGDDFAIACTSFHEANRILDKITTWLGELYLQLQPEKTQIYAPDDEFIFLGYRF

SEQ ID NO: 814 - protein, 247 aa, Scytonema hofmannii
GVDGIDVDLFASAVNDQLRILLRQLQQESYCASPAKGFYLAKSSGGKRLVGIPTVRDRIVQRLLLEELYFPLEDTFLDCSYAYRPGRNIQQAVQHLYSYYHLRPKWIIKADIAEFFDSLSWALLLTALEKLPLEPIVVQLLEGQLRSGIVINGKPIYPGKGVLQGGVLSGALANLYLNEFDKKCLHQGINLVRYGDDFAIACSNWREATRTLDKVAAWLGELYLNLQPEKTQIFAPDDEFTFLGYRF

SEQ ID NO: 815 - protein, 247 aa, Tolypothrix campylonemoides
GVDGMTVDLFAAGVNEQLRILLRQLQQESYRASPAKGFFVAKKSGGKRLIGIPTVRDRIVQRLLLEELYFPLEDTFLDCSYAYRPGRNIQQAVQHLYSYYQYQPKWIIKADIAEFFDNLCWALLFTALEDLQLEPILLQLLEQQLKSGIVIAGKPIYPGKGVLQGGVLSGALANLYLTSFERKCLSYGINLVRYGDDFAIACSSWLEANRILDKITTWLGELYLNLQPEKTQIFAPDDEFTFLGYRF

SEQ ID NO: 816 - protein, 244 aa, Anabaena sp.
GISVDLFAASVDEQLTILLRQLQQESYHPSPAKGFYLTKKTGGKRLVGIPTVQDRIVQRLLLEELYFPLEETFVDCSYAYRPGRNIQQAVQQLFSYYQYHPTWIIKADIAQFFDNLCWALLLTNLEALQLESRILQLLEQQLKAGIIIAGKHINFGKGVLQGGIISGALANLYLTIFDRKCLSNGINLVRYGDDFAVACSSWKEANRILDKIIAWLGELYLTLQPEKTQIFAPNEELKFLGYRF

SEQ ID NO: 817 - protein, 247 aa, Mastigocladus laminosus
GVDGITVDLFAASADQQLRIILRQLQQKSYRASPAKGFYLTKKSGGKRLIGISTVRDRIVQRLLLEELYLPLEDTFVDCSYAYRPGCNIQQAVQRLFSYYQYHPTWIIKADIAQFFDNLSWALLFTGLETLHLEAIVLELLEQQIKSGIVLGGKYINFGKGVLQGGILSGALANLYLTAFDRKCLSHGINLVRYGDDFAVACSSWTEANRILDKITTWLGGLYLTLQPEKTQVFAPHEEFTFLGYRF

SEQ ID NO: 818 - protein, 250 aa, Pseudoalteromonas rubra
GVDCQSIASFESELQLGLNSILYDLRQQHYTPAALKRSQLKLPGKKPRWLAFPTVRDRIVHTAIAILLQPYFEEEFEHNSYGYRPGRSYIMAVDKVIEHRNQRRRHVFDADIQGYFDHIPQDKLLTKLQATAIDPTLIELIFTLLFSFQQSNDGLVFGKALGQGIPQGSAICPLLANFYLDELDEHLNALGYHMVRYADDFVVCCDSAKAAQHAQYHTEQVLTHLALTLNLNKTQLTTFADGFKFLGHYF

SEQ ID NO: 819 - protein, 249 aa, Vibrio rotiferianus
GADGISIKEFASDLDTQLRQLHYDWKNNRYKPYRYRNITIEKANKKPRELAVPTVRDRILHSALAQKLLNIFEAEFEHISYGYRPNRSYTHAIRHIEQLRDQGYSTVIDADIQGYFDNICHIKLTELLNRHLPSDWVSAITDTLLSQQQADGHLYFGAEIGVGIPQGSPLSPLLANLYLDGFDEALLDRGEQIIRYADDFVILLPNEDRAQSCLAFVTDYLNQLKLTLNCEKTKVVSFQDGFTFLGVTF

SEQ ID NO: 820 - protein, 246 aa, Vibrio vulnificus
GVTIQTFAIHLDTNLNTLLSAWNHGNYAPSPYRPLTIQPNEKKTRQLAIPTVADRIIHTAIAQKLVAKFEPEFEHISYGYRPNRSYTHAIRHIEQLRNQGYLYVLDADIKGYFDHICHKRLKQILQKYLEDNWVESIMTLLLSQQMPAQTLLFGVELGRGIPQGSPLSPLLANLYLDGFDEALLDRGEQIVRYADDFVVLVTHEQQAQHCLAFVTQYLASLKLQLNTEKTRVVSFQDGFTFLGVSF

SEQ ID NO: 821 - protein, 361 aa, Herpetosiphon aurantiacus
GPDAVTILDFEAAWVDHMQQLAMELQSQIYRPLPPRRLFLDKRDGGKRSIAILAVRDRIAQRAVLQILEPEIEPTFLDCSYGFRPYVGVPHALTRIERYRQQGLQWVAHADISDCFGTIDHQILLSQLHQRISDRAVVELIGQWLSVGVMEDAATTEASNWWDDGEDLLERLAKHGEDLLWPNQYPQAGPSYAPQMLDFEANRTDSLRKRALQGLASNAALWGITHSKRVISGLRSLAPLFKQVPGGSLTWGAAGIATLALIPLSQRLLRQHERGTLQGGAISPMLANIYLDSFDRAMTERGHILVRFADDFVLLGAHQAAVEQALADATNVLKRLRLATKESKTGVQHFNDGLTFLGHRF

SEQ ID NO: 822 - protein, 249 aa, Accumulibacter sp.
GADEQTLAEFAADAEAQLGLLALQLTQGSYRPAPARLIPVAKPGGGVRELLLPAVRDRIVQSALARYLADLLEPDFGEASHAYRPGHSVATALHRLQALRDGGLVFVAVCDIHHFFDSVDHRRLFSLLDDLPLERRLREQMKTCVRIEVADVQGQGAWSLARGLAQGSPLSPVLANLFLMAFDAACARAGLALVRYADDCVLACASETEAQSALAFAADALENIGLALNTRKSRLASFAEGFEFLGAFC

SEQ ID NO: 823 - protein, 352 aa, Chloroflexus aurantiacus
GIDQITLHDFAADWPNQMVRLAEELRDGSYRPLPPRRVAIAKASGGERAIAILTIRDRIAQRAVQQVLTPLFEPLFLDCSYGSRLAVGVPEAIERVVRYTEQGLIWVIDGDIRAYFDSIDHGILLGLLRQRIDEPAILHLIAQWLAVGSVHTETPDETLPDSPLVALLRRSGELIHEALNAPSDPLPTAYDYPDLSRPASPHSGIPTGLFAALSLAQPAFEIARQLTPLLKRIGAQRLAVGGALAVGTVLLSELVHRAQASHDRRGTLQGGPLSPLLANIYLHPFDLAMTAHGARMVRFVDDFVVMCPDRTTAEHTLVLVERQLATLRLTLNPQKTRIVAYAGGIEFLGQAL

SEQ ID NO: 824 - protein, 362 aa, Chloroflexus aurantiacus
GLDAVTLRDFEVDWTRQMAQLADELQQGTYRPLPAKRVAIPKASGGERAIAILAVRDRVAQRAVQQVLDPLFDPCFLDCSYGCRPYVGVPDAIARVQRYADQGLGWVVDADIATCFDSLDQRVLLSLVRQRIDELPVLKLIAQWLEAGVLQGEAALPGDTPPTPLQRGEAAVRRALSWGAERLHPPPPVGPYAAAMWETPGGSIGEDGWAPRQPGLESHLWTAVMLARPVIDGARQALPYLQRIGGRRLAVAGAVAVGALALSEAAARLRHASRRGVPQGGALSPLLANIYLHPFDVAMMGQGLRLVRFMDDFVVMCATQEEAECALQFAQRQLHILRLTLNAEKTHITAYADGIEFLGAAL

SEQ ID NO: 825 - protein, 245 aa, Kuenenia stuttgartiensis
GADGVTIERYEGNLDLNLRIMRKELTEQTYFPLPLLRILVDKGNGEARALCIPSVRDRIVQAAVLQLIEPVLEKEFEECSFAYRKGRSVKQAVYKVREYYEQGYQWVVDADIDAFFDSVDYSLLLLKFKCYIHDPCIQNLVGLWLKGEVWDGKTVTTLKKGIPQGSPISPILANLYLDEFDEELTRNGYKLVRFSDDFIILCKNSGMAKESLKLTKKILEKLLLELDEEQVINFDQGFKFLGVIF

SEQ ID NO: 826 - protein, 247 aa, Methylobacter tundripaludum
GVDYQTLAAFADRLHKNLETLRDEVNYETYQPQPLLRIELEKPGGGTRPLSIPTVRDRILQTAVTRVIEPLFEAEFEDCSFAYRKGRSVDQALDRIQLLQRQGYHWVVDADIQCFFDSIDHTLLMTMVGKLVTDVGLLRLIEQWLCATVVDGDRRFVLSKGVAQGSPIGPLLSNLYLHHLDEALLDNNLCLIRFADDFLILCKSQDHAEQALELTDSLLGELRLTLNTRKTQIVHFNQGFRFLGVQF

SEQ ID NO: 827 - protein, 248 aa, Pelodictyon phaeoclathratiforme
GYDKQSITDYSWRIEEHLADLGRQLLTNTYEPQPLLKLVMLKPTGKLRTLLIPTVMERVAQTAAAIVLTPLVESELGANTFAYRPGLSRMTAAREIERLRNLGYNWVVDADISSFFDTVDHPLLFQRFRELCDDEELLTLIARWLTAEIVDGQNPKVKNTIGLPQGCPISPMLANLYLDKFDERMEQEGFKLVRFADDFLILCKSKPKAEAALQLSESALAELKLQLNNEKTRITTFAEGFKYLGYLF

SEQ ID NO: 828 - protein, 248 aa, Chlorobium phaeobacteroides
GWDNTSIQDYSLRLEENLKSLSHALLTGTYRQSPLLKLVMLKPDGKERVLLIPGVIDRVAQTAASIVLSPIIEAELGNCTFAYRPGISREGAAREIDRLHREGYQWVLDADIRNFFDNVRHDLLFQRLVELVDDKEMISLLHRWLTAEIVDGLNPRTRNTMGLPQGCPISPALANLYLDRFDETMEQQGFKLVRFADDYLVLCKTRPKAEAALKLSESALAELKLELHSDKTRITTFAEGFKYLGYLF

SEQ ID NO: 829 - protein, 247 aa, Rubrivivax benzoatilyticus
GCDGEEVEQFAQGLLGRLHTLQAEVADGRYVARPLRVVALPKPSGGQRLLAIPGVRDRVLQAAMAHALGRRIEPTLDEASHAYRPGRSVLGALAALLALRDQGRSTVLKADVASFFDRIHQPTLLAQLRRFSADPGLLALVGQVLAAVLDDDGERRLMTRGVPQGSPLSPLLANLYLHPFDVGMRAQGFQLIRYADDLVLACLDADEAARAQDAAARALRELHLELNPAKTRIASFVSGFDFLGVRF

SEQ ID NO: 830 - protein, 220 aa, Tistrella mobilis
GGDGEGVATFQAGLDLRLARLAADLLGGTYRPGPWLIAGGAVVAPVADRVVMTAVATGLPDPSSDGDPAAVMARLAALGQQGAVHLLDGTITHVTDLVPHDLLCERLAALGGDARLVDLFGMWLAVADPEDGLGIPPGLPVSGLLARLHLGAVAARIAAAGVHLVPAAGEILVLATGAAAAEDARGRMLALLADHGLYVDVDLPRMIRLDQAGPRLGRIM

SEQ ID NO: 831 - protein, 247 aa, Pseudanabaena biceps
GVDRESVVHFAKNSEAYLSQLRRSLASGYYHPMPLRQLFIPKKAGGWRELGVPTVRDRIVQHALLNILHPLLEPQFEACSFAYRPGRSHLSAVRQIAQWRDRGYEWVLDADVVRYFENILWQRLLDEVAERLAAPEVLSLISAWLSVGVLSKEGLMFPQKGISQGSAISPILANVYLDDFDEIVTATGLKLVRYADDFVVMSRSQKRIVEAKDEVADLMNGIGLQLHPDKTRIVDFDRGFRFLGHAF

SEQ ID NO: 832 - protein, 202 aa, Leptolyngbya sp.
MRVPTVRDRIVQQALLNVLHPVLEPQFEPVSFAYRPGRSHKLAVEKVSAWHRRGYDWLLDGDIVSYFDQVEHSRLLSEVDERLGASDFETLALRLIEQWNTVGTLTSAGLVLPERGIPQGSVVSPILANVYLDDFDEALQASRFKLVRFADDFVVMGRSQRQAEQAQAKVAELLTTMGLQLHPDKTQITNFDRGFRFLGHAF

SEQ ID NO: 833 - protein, 247 aa, Nodosilinea nodulosa
GVDGETIYAFGLHKSRNLTRLLQQVATSTYRPLPLRQFFIPKKSGGWRELGVPTVRDRIVQQALLQVLHPVFEVEFEPQSYAYRPGRSHRMAVERVAHWRSRGYDWVLDADIVKYFDTLQHPRLLAEVKERLNQPWVLALLQGWITAGTLTREGILLPTCGVPQGSPISPLLANVYLDDFDELLTQAGHKLVRYADDFVVLARTQQRLVEAQTYVAQLLEGMGLSLHPNKTQITTFDRGFRFLGHAF

SEQ ID NO: 834 - protein, 204 aa, Synechococcus sp.
MRIPAVADRIVQQALLNVLYPILEPEFEVCSFAYRPGRSHRMAVDQIHAFSRRGYRWVMEADIFDYFDHIGHRRLLAEVAERLPGQDPSFCDLVLQLVQQWIAVGVVTQSGLILPQAGIPQGAVIAPILANVYLDDFDEALLRTPLKLVRYADDFVILGQRERQVQKILPEVAQQMAEIGLQLNMSKTRITNFQKGFKFLGHIF

SEQ ID NO: 835 - protein, 113 aa, Leptolyngbya sp.
MAIGHLVEQWIGSGVSTASGLILPNKGVPQGAVISPILANVYFDDFDEAIEAAGLKLVRYADDFVILAKSKARIERAYNLVASLLHAMGLELHPDKTRVTTFNEGFRFLGHTF

SEQ ID NO: 836 - protein, 157 aa, Rhodobacter capsulatus
AVDRISALRRMGYTWVVEADIEKAFDRIPHDPVLEALDTALDPAPGTRALIDLVGLWLAHGSGQLGTPGRGLAQGSPLSPLLSNLFFDGLDDRFDSGAARIVRFADDFVILARSEAGAEEARALAEEFVAGHGLRMVSRETRVVGFDRGFQFLGQLF

SEQ ID NO: 837 - protein, 240 aa, Woodsholea maritima
GGDGQTLAQFQRTVLLHLHRLGDDVRAGLYMPGPHRVVSIPKRAGGWRSLSIPCVRDRVLQTAVAQRLQPILEPEFEPESYGYRPGRSVAQAIARVATLRRQGFRWTVDADIERFFDCVPHGPLLERLRPFLGDPGLVGLVEMWLAGAGPHGRGLPQGSPISPLLANLYLDDVDEGLKSTHTRLVRFADDFVILTRNEDEALQALERARGLLDKLGLSLNLEKTRIVPFEGGLDFLGRKF

SEQ ID NO: 838 - protein, 240 aa, Loktanella vestfoldensis
GGDGVTIDAFDAIAEPRLQALHAALASGGYWPAPARVIEAKKPSGGTRTLRIPAIVDRVVQTAAALVLTPILDREFEDASFGYRPGRSVGQAVARVAYLRNAGYVWTVDGDIRAFFDEVPHAPLLDRVDRVLGCARTADLVERWLQVYCDGGRGLPQGMPLSPVLSNLYLDSIDEKIEKGGVRLVRFADDFLLLCRSEAVAEGALARMTGILREAGLKIHPEKTAIRRFEDATRFLGHMF

SEQ ID NO: 839 - protein, 244 aa, Tistrella mobilis
GESLDAFHIGVEPRLARLAADVRGGTYRPGPYRLLDVPKDDGGTRRLAIPCVADRVLMTSAALVMGPMLDATFEPSSHGYRPGRGVRTAIARVESLRDQGFHWVLDADITRFFDRVPHDRLLDRLQQATGDARLVDLVGLWLDGYDREGEAGRGDGLGLPQGSPVSPLLANLYLDTVDERIAAAGLHLVRFADDFVILAADEAAAEGARAHVAALLADHGLHLHPDKTRVVSFDQGFAFLGKLF

SEQ ID NO: 840 - protein, 237 aa, Desulfarculus baarsii
RQTLDDFAESLERNLEGLHAALRSASYRPGPIRNVSIPKRDGSPRRLSIPSVADRVVQTALCQGLTPILEPEMEDASFAYRPGRSVQMAVERVGRYFRQGYHWVVDGDIDDYFDSIPHHGLMAVLRRYVDDQDVLGLIAQWLAHAHAGGVGVSQGSPLSPLLANIYLDDMDERIGRTGARLVRFADDFLLLCKSEERARESLAAMSALLAEYGLGLNPDKTRIVNFEQGFEFLGRLF

SEQ ID NO: 841 - protein, 242 aa, Rhodobacter capsulatus
GGDGETIAHFARQAEFRLARLAHELQADLYRPGPLRQISVPKRKGEGMRVLSIPCVVDRIAQRATAAVLSAALEPQFSDASFGYRPGRSVAQAVARVDALRRQGFTWVVDADIKAFFDSVPHAPLAARLHAAGIEPQLIELIDLWLDSFSAEGVGLAQGSPISPVLANLHLDALDDSFGPRGSVRIVRFADDFVLLTRCRPGAEAALAKARDQLAEAGLRLNLAKTRIVPYDQALRFLGHLF

SEQ ID NO: 842 - protein, 240 aa, Rhodovulum sp.
GGDGMTVARFALVAESMIQRLAGALRSGQYRPGPARRAFIPKKDGGLRPLDIPCVHDRVVQGAATLVLDPVLDKAFADSSFAYRRGRSVAQAVARIGSLRRQGFTHVVDGDIRAYFERIPHDRLITKLEQHVDDQAMVDLIWLWLETYSLTGRGVPQGAPISPLLANLYLDAVDDRIERAGVRLVRFADDFVLLAKTPASAEKALVEMTRLLAEEGLEIHPEKTRLVSFEEGFRFLGHVF

SEQ ID NO: 843 - protein, 240 aa, Rhodovulum sp.
GGDGVPLARFLVNAPARIARLSAGLRDGSYAPGPLRRVDIPKKSGGTRPLAIPCVVDRIAQTAVMQALAPRLDEEFAESSFGYRLGRGVRDAVKRVAALRGKGHVYVVDADIAKFFESVPHDKLLERLAQSMTDGPLMRLIGLWIEHGGARGRGLPQGSPLSPLLANLYLDRLDDAFAKRGAHIVRFADDFVILAESRHGAEGALVRAEKLLAEHGLSLNREKTRVTSFDQGFRFLGHLF

SEQ ID NO: 844 - protein, 248 aa, Rhodovulum sulfidophilum
GGDGVTIDRFARRAPQRLTALSGALLDGRYRPGDLRRIDLKKRDGGTRPLAIPSVIDRVAQTAAALVLTPILDPLFDEASFGYRPGRSVAMAVRRIDMLRRRGFCHVVEADIVRCFERIPHEPVLSSLAKTLAGRVGADRLVDLVALWLEHAAMFLETPGLGLAQGSPLSPLLSNLYLDRLDDALDRRDVAVVRFADDFVLLCRSREAAAKALNRAENLLEAHGLELHGDGTRIVDFDRGFEFLGHLF

SEQ ID NO: 845 - protein, 237 aa, Azospirillum lipoferum
GLTVGRFAEAAPSRLLALHRTLRMGDYRPGPLRRLSIPKPDGALRPLAIPPVTDRVAQTAAALVLTPLLDGEFEDASFGYRPGRSVPQAVARVARWRDQGYDWVVDADIERYFERVPHDRLLIRLERSIGAGPLTELIAVWLESGAENGVGLPQGSPLSPLLSNLYLDDLDEALDGRGLRLVRFADDFVLLCRSRERAERALDHAAAVLEEHGLRLNRDKTRIVPFDQGFRFLGHLF

SEQ ID NO: 846 - protein, 237 aa, Azospirillum lipoferum
GMTVEEFSIDLPTRLVRLQLALAQGTYRPGRLRRVDVAKEDGGTRPLAIPPVVDRVAQTAVAQVLTPLLDPRMHDGSFAYRPGRSVAMAVARVAEHRRQGFGWVVDGDIERYFERVPHERMMACLARVIDEPPLLDLIELWLESFSAMGLGLPQGAPLSPLLANLYLDDIDDRIAARGVRLVRFADDFLLMCRGEAAAEDARDRMAALLAEHGLRLHPDKTRIVPFEQGFRFLGHLF

SEQ ID NO: 847 - protein, 1802 aa, synthetic construct
MSTIDVTLKEVADPIRLKLAWTKIKKKGSIGGVDGVTISSFNANLEVNLSELSNQILTNQYTPEPLQAAHIPKPGKSEKRQLGLPSLKDKIVQSSLASILSDFYEIHFSNCSYAYRPGKGSVKAIGRVRDFLNRKNYWIASVDIDNFFDSVDHEICTSILKEQISDQSIIRLISLYFSSGMIKFDQWQDTEIGIPQGGAISPVISNIYLNKLDHFLHTLNAFFVRYADDIILFSNTQQSLSETYQKTNEFLNKKLNLKLNALDNPIINVSKGFSFLGIYFHRCQLKIDFKRIDEKIEKMKYIIHKQKQIDAVIKEINEFFNGVQRHYGNIIPDSYQLKNLESTVLDELSIFLAKMKNEGHINSKKACKLVLDPLVFMSERTKSQRDAVIDKIIADAFTIVDQKKDTDEKRIEKSVDSAIHQKRQAYAKKIATETEDKKYSIGLDIGTNSVGWAVITDEYKVPSKKFKVLGNTDRHSIKKNLIGALLFDSGETAEATRLKRTARRRYTRRKNRICYLQEIFSNEMAKVDDSFFHRLEESFLVEEDKKHERHPIFGNIVDEVAYHEKYPTIYHLRKKLVDSTDKADLRLIYLALAHMIKFRGHFLIEGDLNPDNSDVDKLFIQLVQTYNQLFEENPINASGVDAKAILSARLSKSRRLENLIAQLPGEKKNGLFGNLIALSLGLTPNFKSNFDLAEDAKLQLSKDTYDDDLDNLLAQIGDQYADLFLAAKNLSDAILLSDILRVNTEITKAPLSASMIKRYDEHHQDLTLLKALVRQQLPEKYKEIFFDQSKNGYAGYIDGGASQEEFYKFIKPILEKMDGTEELLVKLNREDLLRKQRTFDNGSIPHQIHLGELHAILRRQEDFYPFLKDNREKIEKILTFRIPYYVGPLARGNSRFAWMTRKSEETITPWNFEEVVDKGASAQSFIERMTNFDKNLPNEKVLPKHSLLYEYFTVYNELTKVKYVTEGMRKPAFLSGEQKKAIVDLLFKTNRKVTVKQLKEDYFKKIECFDSVEISGVEDRFNASLGTYHDLLKIIKDKDFLDNEENEDILEDIVLTLTLFEDREMIEERLKTYAHLFDDKVMKQLKRRRYTGWGRLSRKLINGIRDKQSGKTILDFLKSDGFANRNFMQLIHDDSLTFKEDIQKAQVSGQGDSLHEHIANLAGSPAIKKGILQTVKVVDELVKVMGRHKPENIVIEMARENQTTQKGQKNSRERMKRIEEGIKELGSQILKEHPVENTQLQNEKLYLYYLQNGRDMYVDQELDINRLSDYDVDAIVPQSFLKDDSIDNKVLTRSDKNRGKSDNVPSEEVVKKMKNYWRQLLNAKLITQRKFDNLTKAERGGLSELDKAGFIKRQLVETRQITKHVAQILDSRMNTKYDENDKLIREVKVITLKSKLVSDFRKDFQFYKVREINNYHHAHDAYLNAVVGTALIKKYPKLESEFVYGDYKVYDVRKMIAKSEQEIGKATAKYFFYSNIMNFFKTEITLANGEIRKRPLIETNGETGEIVWDKGRDFATVRKVLSMPQVNIVKKTEVQTGGFSKESILPKRNSDKLIARKKDWDPKKYGGFDSPTVAYSVLVVAKVEKGKSKKLKSVKELLGITIMERSSFEKNPIDFLEAKGYKEVKKDLIIKLPKYSLFELENGRKRMLASAGELQKGNELALPSKYVNFLYLASHYEKLKGSPEDNEQKQLFVEQHKHYLDEIIEQISEFSKRVILADANLDKVLSAYNKHRDKPIREQAENIIHLFTLTNLGAPAAFKYFDTTIDRKRYTSTKEVLDATLIHQSITGLYETRIDLSQLGGD

SEQ ID NO: 848 - protein, 1728 aa, synthetic construct
MGQYQLQDAYGYCSYPRPQAAKSLLEKSLSDASLHQACQTMYPRQANFDSSDTDEEHHDAIDELLTKLYVSRERIFKREFTPSQLHSVEIEKPEGGTRLLSVPNWHDRTLQKAVTECLGNTLEHIWMKHSYGYRKGHSRLQARDQINQYIQQGYEWVLESDIESFFDSVNWLNLEQRLKLLLPNEPLVPLLMQWVSAAKQTEDEQTLARHNGLPQGAPISPILANLLLDDLDQDMIAKGHQIVRYADDFVLLFKSKAAAESALDDIITALKEHHLAINLEKTRIVEASQGFRYLGYLFGGSQYKLILNGKTLKGETTTEAVDAATAEKVFKQYANDNGVDGEWTYDDATKTFTVTEGGSKLDKKYSIGLDIGTNSVGWAVITDEYKVPSKKFKVLGNTDRHSIKKNLIGALLFDSGETAEATRLKRTARRRYTRRKNRICYLQEIFSNEMAKVDDSFFHRLEESFLVEEDKKHERHPIFGNIVDEVAYHEKYPTIYHLRKKLVDSTDKADLRLIYLALAHMIKFRGHFLIEGDLNPDNSDVDKLFIQLVQTYNQLFEENPINASGVDAKAILSARLSKSRRLENLIAQLPGEKKNGLFGNLIALSLGLTPNFKSNFDLAEDAKLQLSKDTYDDDLDNLLAQIGDQYADLFLAAKNLSDAILLSDILRVNTEITKAPLSASMIKRYDEHHQDLTLLKALVRQQLPEKYKEIFFDQSKNGYAGYIDGGASQEEFYKFIKPILEKMDGTEELLVKLNREDLLRKQRTFDNGSIPHQIHLGELHAILRRQEDFYPFLKDNREKIEKILTFRIPYYVGPLARGNSRFAWMTRKSEETITPWNFEEVVDKGASAQSFIERMTNFDKNLPNEKVLPKHSLLYEYFTVYNELTKVKYVTEGMRKPAFLSGEQKKAIVDLLFKTNRKVTVKQLKEDYFKKIECFDSVEISGVEDRFNASLGTYHDLLKIIKDKDFLDNEENEDILEDIVLTLTLFEDREMIEERLKTYAHLFDDKVMKQLKRRRYTGWGRLSRKLINGIRDKQSGKTILDFLKSDGFANRNFMQLIHDDSLTFKEDIQKAQVSGQGDSLHEHIANLAGSPAIKKGILQTVKVVDELVKVMGRHKPENIVIEMARENQTTQKGQKNSRERMKRIEEGIKELGSQILKEHPVENTQLQNEKLYLYYLQNGRDMYVDQELDINRLSDYDVDAIVPQSFLKDDSIDNKVLTRSDKNRGKSDNVPSEEVVKKMKNYWRQLLNAKLITQRKFDNLTKAERGGLSELDKAGFIKRQLVETRQITKHVAQILDSRMNTKYDENDKLIREVKVITLKSKLVSDFRKDFQFYKVREINNYHHAHDAYLNAVVGTALIKKYPKLESEFVYGDYKVYDVRKMIAKSEQEIGKATAKYFFYSNIMNFFKTEITLANGEIRKRPLIETNGETGEIVWDKGRDFATVRKVLSMPQVNIVKKTEVQTGGFSKESILPKRNSDKLIARKKDWDPKKYGGFDSPTVAYSVLVVAKVEKGKSKKLKSVKELLGITIMERSSFEKNPIDFLEAKGYKEVKKDLIIKLPKYSLFELENGRKRMLASAGELQKGNELALPSKYVNFLYLASHYEKLKGSPEDNEQKQLFVEQHKHYLDEIIEQISEFSKRVILADANLDKVLSAYNKHRDKPIREQAENIIHLFTLTNLGAPAAFKYFDTTIDRKRYTSTKEVLDATLIHQSITGLYETRIDLSQLGGD

SEQ ID NO: 849 - protein, 1758 aa, synthetic construct
MGWLYNQMAMPETIFQAWYKVASNDGRPGWDNKSIEDYSLQLEENLKALSQALLTGTYKQGPLMKLVLLKPDGKDRVLLIPGVMDRVAQTAAAIVLSPIIEAELGNCTFAYRPGISREGAAREIDRLHREGYQWVLDADIRSFFDNVRHDLLFQRLVELIDDKEMISLLHRWLTAEIVDGINPRIQNTMGLPQGCPISPALANLYLDRFDETMEKEGFKLVRFADDYLVLCKTRPKAEAALKLSETALAELKLELHSDKTRITTFAEGFKYLGYLFIRALVIPTKMHPEEWYDKLGKFKLRKKSEHALPSDPDAMTGETAKFELETDQGEKIELTKNELLQTEFGCKLLESLDKKQLSVDEFLEKVARQDEERQKEKRDALKKLYSPFLNTDKKYSIGLDIGTNSVGWAVITDEYKVPSKKFKVLGNTDRHSIKKNLIGALLFDSGETAEATRLKRTARRRYTRRKNRICYLQEIFSNEMAKVDDSFFHRLEESFLVEEDKKHERHPIFGNIVDEVAYHEKYPTIYHLRKKLVDSTDKADLRLIYLALAHMIKFRGHFLIEGDLNPDNSDVDKLFIQLVQTYNQLFEENPINASGVDAKAILSARLSKSRRLENLIAQLPGEKKNGLFGNLIALSLGLTPNFKSNFDLAEDAKLQLSKDTYDDDLDNLLAQIGDQYADLFLAAKNLSDAILLSDILRVNTEITKAPLSASMIKRYDEHHQDLTLLKALVRQQLPEKYKEIFFDQSKNGYAGYIDGGASQEEFYKFIKPILEKMDGTEELLVKLNREDLLRKQRTFDNGSIPHQIHLGELHAILRRQEDFYPFLKDNREKIEKILTFRIPYYVGPLARGNSRFAWMTRKSEETITPWNFEEVVDKGASAQSFIERMTNFDKNLPNEKVLPKHSLLYEYFTVYNELTKVKYVTEGMRKPAFLSGEQKKAIVDLLFKTNRKVTVKQLKEDYFKKIECFDSVEISGVEDRFNASLGTYHDLLKIIKDKDFLDNEENEDILEDIVLTLTLFEDREMIEERLKTYAHLFDDKVMKQLKRRRYTGWGRLSRKLINGIRDKQSGKTILDFLKSDGFANRNFMQLIHDDSLTFKEDIQKAQVSGQGDSLHEHIANLAGSPAIKKGILQTVKVVDELVKVMGRHKPENIVIEMARENQTTQKGQKNSRERMKRIEEGIKELGSQILKEHPVENTQLQNEKLYLYYLQNGRDMYVDQELDINRLSDYDVDAIVPQSFLKDDSIDNKVLTRSDKNRGKSDNVPSEEVVKKMKNYWRQLLNAKLITQRKFDNLTKAERGGLSELDKAGFIKRQLVETRQITKHVAQILDSRMNTKYDENDKLIREVKVITLKSKLVSDFRKDFQFYKVREINNYHHAHDAYLNAVVGTALIKKYPKLESEFVYGDYKVYDVRKMIAKSEQEIGKATAKYFFYSNIMNFFKTEITLANGEIRKRPLIETNGETGEIVWDKGRDFATVRKVLSMPQVNIVKKTEVQTGGFSKESILPKRNSDKLIARKKDWDPKKYGGFDSPTVAYSVLVVAKVEKGKSKKLKSVKELLGITIMERSSFEKNPIDFLEAKGYKEVKKDLIIKLPKYSLFELENGRKRMLASAGELQKGNELALPSKYVNFLYLASHYEKLKGSPEDNEQKQLFVEQHKHYLDEIIEQISEFSKRVILADANLDKVLSAYNKHRDKPIREQAENIIHLFTLTNLGAPAAFKYFDTTIDRKRYTSTKEVLDATLIHQSITGLYETRIDLSQLGGD

SEQ ID NO: 850 - protein, 1753 aa, synthetic construct
MGTANELPLLEQALSDDRLLAGWERVRANAGGPGVDGVTVEQFGGKVLRALAGLRQRVTASHYQALPLRRIEITRPGKAPRVLAVPCVADRVVQSAVALTISPRLDPGFEDFSFGYRPGRSVPRAVQHLAEARDSGLVWVAEADIQSCFDRIPWAALLQRLGEVLPDAGLLALIQHWLSLPLQWPDGHQQVRCMGVPQGSPLSPLLSNVFLDGMDKELAAGPWRVIRYADDFVIAAASREEARRGLAQAARWLRRLGLRLNLDKTRVIHFDQGFSFLGVRFRGRQMSAVQPGAEPWVLPRATQPRPHSPSSKPAQHSRSPAPTARASAPATPPSAQPEPLGPAAPSPNAAASAQPSQPRAADATLQDLQRLSVAPPNEPSPPRLRTDKKYSIGLDIGTNSVGWAVITDEYKVPSKKFKVLGNTDRHSIKKNLIGALLFDSGETAEATRLKRTARRRYTRRKNRICYLQEIFSNEMAKVDDSFFHRLEESFLVEEDKKHERHPIFGNIVDEVAYHEKYPTIYHLRKKLVDSTDKADLRLIYLALAHMIKFRGHFLIEGDLNPDNSDVDKLFIQLVQTYNQLFEENPINASGVDAKAILSARLSKSRRLENLIAQLPGEKKNGLFGNLIALSLGLTPNFKSNFDLAEDAKLQLSKDTYDDDLDNLLAQIGDQYADLFLAAKNLSDAILLSDILRVNTEITKAPLSASMIKRYDEHHQDLTLLKALVRQQLPEKYKEIFFDQSKNGYAGYIDGGASQEEFYKFIKPILEKMDGTEELLVKLNREDLLRKQRTFDNGSIPHQIHLGELHAILRRQEDFYPFLKDNREKIEKILTFRIPYYVGPLARGNSRFAWMTRKSEETITPWNFEEVVDKGASAQSFIERMTNFDKNLPNEKVLPKHSLLYEYFTVYNELTKVKYVTEGMRKPAFLSGEQKKAIVDLLFKTNRKVTVKQLKEDYFKKIECFDSVEISGVEDRFNASLGTYHDLLKIIKDKDFLDNEENEDILEDIVLTLTLFEDREMIEERLKTYAHLFDDKVMKQLKRRRYTGWGRLSRKLINGIRDKQSGKTILDFLKSDGFANRNFMQLIHDDSLTFKEDIQKAQVSGQGDSLHEHIANLAGSPAIKKGILQTVKVVDELVKVMGRHKPENIVIEMARENQTTQKGQKNSRERMKRIEEGIKELGSQILKEHPVENTQLQNEKLYLYYLQNGRDMYVDQELDINRLSDYDVDAIVPQSFLKDDSIDNKVLTRSDKNRGKSDNVPSEEVVKKMKNYWRQLLNAKLITQRKFDNLTKAERGGLSELDKAGFIKRQLVETRQITKHVAQILDSRMNTKYDENDKLIREVKVITLKSKLVSDFRKDFQFYKVREINNYHHAHDAYLNAVVGTALIKKYPKLESEFVYGDYKVYDVRKMIAKSEQEIGKATAKYFFYSNIMNFFKTEITLANGEIRKRPLIETNGETGEIVWDKGRDFATVRKVLSMPQVNIVKKTEVQTGGFSKESILPKRNSDKLIARKKDWDPKKYGGFDSPTVAYSVLVVAKVEKGKSKKLKSVKELLGITIMERSSFEKNPIDFLEAKGYKEVKKDLIIKLPKYSLFELENGRKRMLASAGELQKGNELALPSKYVNFLYLASHYEKLKGSPEDNEQKQLFVEQHKHYLDEIIEQISEFSKRVILADANLDKVLSAYNKHRDKPIREQAENIIHLFTLTNLGAPAAFKYFDTTIDRKRYTSTKEVLDATLIHQSITGLYETRIDLSQLGGD

SEQ ID NO: 851 - protein, 1698 aa, synthetic construct
MSTLPTPSSTDQDSPPPFWTLARLAEALEHVSARQGGAGADEQTLAEFAADAEAQLGLLALQLTQGSYRPAPARLIPVAKPGGGVRELLLPAVRDRIVQSALARYLADLLEPDFGEASHAYRPGHSVATALHRLQALRDGGLVFVAVCDIHHFFDSVDHRRLFSLLDDLPLERRLREQMKTCVRIEVADVQGQGAWSLARGLAQGSPLSPVLANLFLMAFDAACARAGLALVRYADDCVLACASETEAQSALAFAADALENIGLALNTRKSRLASFAEGFEFLGAFCGAEGMLGGRPGEAACLPPTTGPVHEAAAADDERPPSHGHRPRLRDKKYSIGLDIGTNSVGWAVITDEYKVPSKKFKVLGNTDRHSIKKNLIGALLFDSGETAEATRLKRTARRRYTRRKNRICYLQEIFSNEMAKVDDSFFHRLEESFLVEEDKKHERHPIFGNIVDEVAYHEKYPTIYHLRKKLVDSTDKADLRLIYLALAHMIKFRGHFLIEGDLNPDNSDVDKLFIQLVQTYNQLFEENPINASGVDAKAILSARLSKSRRLENLIAQLPGEKKNGLFGNLIALSLGLTPNFKSNFDLAEDAKLQLSKDTYDDDLDNLLAQIGDQYADLFLAAKNLSDAILLSDILRVNTEITKAPLSASMIKRYDEHHQDLTLLKALVRQQLPEKYKEIFFDQSKNGYAGYIDGGASQEEFYKFIKPILEKMDGTEELLVKLNREDLLRKQRTFDNGSIPHQIHLGELHAILRRQEDFYPFLKDNREKIEKILTFRIPYYVGPLARGNSRFAWMTRKSEETITPWNFEEVVDKGASAQSFIERMTNFDKNLPNEKVLPKHSLLYEYFTVYNELTKVKYVTEGMRKPAFLSGEQKKAIVDLLFKTNRKVTVKQLKEDYFKKIECFDSVEISGVEDRFNASLGTYHDLLKIIKDKDFLDNEENEDILEDIVLTLTLFEDREMIEERLKTYAHLFDDKVMKQLKRRRYTGWGRLSRKLINGIRDKQSGKTILDFLKSDGFANRNFMQLIHDDSLTFKEDIQKAQVSGQGDSLHEHIANLAGSPAIKKGILQTVKVVDELVKVMGRHKPENIVIEMARENQTTQKGQKNSRERMKRIEEGIKELGSQILKEHPVENTQLQNEKLYLYYLQNGRDMYVDQELDINRLSDYDVDAIVPQSFLKDDSIDNKVLTRSDKNRGKSDNVPSEEVVKKMKNYWRQLLNAKLITQRKFDNLTKAERGGLSELDKAGFIKRQLVETRQITKHVAQILDSRMNTKYDENDKLIREVKVITLKSKLVSDFRKDFQFYKVREINNYHHAHDAYLNAVVGTALIKKYPKLESEFVYGDYKVYDVRKMIAKSEQEIGKATAKYFFYSNIMNFFKTEITLANGEIRKRPLIETNGETGEIVWDKGRDFATVRKVLSMPQVNIVKKTEVQTGGFSKESILPKRNSDKLIARKKDWDPKKYGGFDSPTVAYSVLVVAKVEKGKSKKLKSVKELLGITIMERSSFEKNPIDFLEAKGYKEVKKDLIIKLPKYSLFELENGRKRMLASAGELQKGNELALPSKYVNFLYLASHYEKLKGSPEDNEQKQLFVEQHKHYLDEIIEQISEFSKRVILADANLDKVLSAYNKHRDKPIREQAENIIHLFTLTNLGAPAAFKYFDTTIDRKRYTSTKEVLDATLIHQSITGLYETRIDLSQLGGD

SEQ ID NO: 852 - protein, 1692 aa, synthetic construct
MLYVEQLATAWHLVQRGSRAAGIDGITVDLFTGIAREQIHQLYRQMRQERYVARPAKGFYLAKQKGGHRLIGIPTVRDRIVQRYLLQSIYPSLENAFSDAVFAYRPGLSIYAAVKRVMERYRYQPTWVIKADIQQFFDQLSWPLLLHQLDQLSLPATWVQWIEQQLKAGIVVSGQFYQPGQGVLPGSILSGALANLYLNDFDRHCLEADIPLVRYGDDCVAVCQSYLEASRSLALMQDWIEGLSLSFHPEKTTIIPPGQAFVFLGHRFRNGTVEGPARQKAEGRRQKAPQPGYGPPQLCSIVKSPRRMLATSTDDYWRDGMTTKLDKKYSIGLDIGTNSVGWAVITDEYKVPSKKFKVLGNTDRHSIKKNLIGALLFDSGETAEATRLKRTARRRYTRRKNRICYLQEIFSNEMAKVDDSFFHRLEESFLVEEDKKHERHPIFGNIVDEVAYHEKYPTIYHLRKKLVDSTDKADLRLIYLALAHMIKFRGHFLIEGDLNPDNSDVDKLFIQLVQTYNQLFEENPINASGVDAKAILSARLSKSRRLENLIAQLPGEKKNGLFGNLIALSLGLTPNFKSNFDLAEDAKLQLSKDTYDDDLDNLLAQIGDQYADLFLAAKNLSDAILLSDILRVNTEITKAPLSASMIKRYDEHHQDLTLLKALVRQQLPEKYKEIFFDQSKNGYAGYIDGGASQEEFYKFIKPILEKMDGTEELLVKLNREDLLRKQRTFDNGSIPHQIHLGELHAILRRQEDFYPFLKDNREKIEKILTFRIPYYVGPLARGNSRFAWMTRKSEETITPWNFEEVVDKGASAQSFIERMTNFDKNLPNEKVLPKHSLLYEYFTVYNELTKVKYVTEGMRKPAFLSGEQKKAIVDLLFKTNRKVTVKQLKEDYFKKIECFDSVEISGVEDRFNASLGTYHDLLKIIKDKDFLDNEENEDILEDIVLTLTLFEDREMIEERLKTYAHLFDDKVMKQLKRRRYTGWGRLSRKLINGIRDKQSGKTILDFLKSDGFANRNFMQLIHDDSLTFKEDIQKAQVSGQGDSLHEHIANLAGSPAIKKGILQTVKVVDELVKVMGRHKPENIVIEMARENQTTQKGQKNSRERMKRIEEGIKELGSQILKEHPVENTQLQNEKLYLYYLQNGRDMYVDQELDINRLSDYDVDAIVPQSFLKDDSIDNKVLTRSDKNRGKSDNVPSEEVVKKMKNYWRQLLNAKLITQRKFDNLTKAERGGLSELDKAGFIKRQLVETRQITKHVAQILDSRMNTKYDENDKLIREVKVITLKSKLVSDFRKDFQFYKVREINNYHHAHDAYLNAVVGTALIKKYPKLESEFVYGDYKVYDVRKMIAKSEQEIGKATAKYFFYSNIMNFFKTEITLANGEIRKRPLIETNGETGEIVWDKGRDFATVRKVLSMPQVNIVKKTEVQTGGFSKESILPKRNSDKLIARKKDWDPKKYGGFDSPTVAYSVLVVAKVEKGKSKKLKSVKELLGITIMERSSFEKNPIDFLEAKGYKEVKKDLIIKLPKYSLFELENGRKRMLASAGELQKGNELALPSKYVNFLYLASHYEKLKGSPEDNEQKQLFVEQHKHYLDEIIEQISEFSKRVILADANLDKVLSAYNKHRDKPIREQAENIIHLFTLTNLGAPAAFKYFDTTIDRKRYTSTKEVLDATLIHQSITGLYETRIDLSQLGGD

SEQ ID NO: 853 - protein, 1704 aa, synthetic construct
MFTQEHLHFAWLQVCAGSKTAGVDGISVELFESMATEQLQNLVYQLNNETYTASPAKGFYIPKKNGDKRLVGIPTVRDRIIQRLLLDELYFPLEGTFLDCSYAYRPGHNILQAVQHLYGYYQYQPKWIIKADVADFFDNLSWALLLTFLEKLSLEPSVLQLIEQQLQSGMIIAGQYRNFGKGVLQGGILSGALANLYLTNFDKKCLSQGINLVRYGDDFVIACNSWQEANRILDKITVWLGEVYLTLQSEKTQIFTPNDEFTFLGYRFAGGEVYAPPPPKPVLKGEWVINDSGNPYFRTKPRPKKPVSHPPKACSIDKPINFPRASLSHYWQETMTTDKKYSIGLDIGTNSVGWAVITDEYKVPSKKFKVLGNTDRHSIKKNLIGALLFDSGETAEATRLKRTARRRYTRRKNRICYLQEIFSNEMAKVDDSFFHRLEESFLVEEDKKHERHPIFGNIVDEVAYHEKYPTIYHLRKKLVDSTDKADLRLIYLALAHMIKFRGHFLIEGDLNPDNSDVDKLFIQLVQTYNQLFEENPINASGVDAKAILSARLSKSRRLENLIAQLPGEKKNGLFGNLIALSLGLTPNFKSNFDLAEDAKLQLSKDTYDDDLDNLLAQIGDQYADLFLAAKNLSDAILLSDILRVNTEITKAPLSASMIKRYDEHHQDLTLLKALVRQQLPEKYKEIFFDQSKNGYAGYIDGGASQEEFYKFIKPILEKMDGTEELLVKLNREDLLRKQRTFDNGSIPHQIHLGELHAILRRQEDFYPFLKDNREKIEKILTFRIPYYVGPLARGNSRFAWMTRKSEETITPWNFEEVVDKGASAQSFIERMTNFDKNLPNEKVLPKHSLLYEYFTVYNELTKVKYVTEGMRKPAFLSGEQKKAIVDLLFKTNRKVTVKQLKEDYFKKIECFDSVEISGVEDRFNASLGTYHDLLKIIKDKDFLDNEENEDILEDIVLTLTLFEDREMIEERLKTYAHLFDDKVMKQLKRRRYTGWGRLSRKLINGIRDKQSGKTILDFLKSDGFANRNFMQLIHDDSLTFKEDIQKAQVSGQGDSLHEHIANLAGSPAIKKGILQTVKVVDELVKVMGRHKPENIVIEMARENQTTQKGQKNSRERMKRIEEGIKELGSQILKEHPVENTQLQNEKLYLYYLQNGRDMYVDQELDINRLSDYDVDAIVPQSFLKDDSIDNKVLTRSDKNRGKSDNVPSEEVVKKMKNYWRQLLNAKLITQRKFDNLTKAERGGLSELDKAGFIKRQLVETRQITKHVAQILDSRMNTKYDENDKLIREVKVITLKSKLVSDFRKDFQFYKVREINNYHHAHDAYLNAVVGTALIKKYPKLESEFVYGDYKVYDVRKMIAKSEQEIGKATAKYFFYSNIMNFFKTEITLANGEIRKRPLIETNGETGEIVWDKGRDFATVRKVLSMPQVNIVKKTEVQTGGFSKESILPKRNSDKLIARKKDWDPKKYGGFDSPTVAYSVLVVAKVEKGKSKKLKSVKELLGITIMERSSFEKNPIDFLEAKGYKEVKKDLIIKLPKYSLFELENGRKRMLASAGELQKGNELALPSKYVNFLYLASHYEKLKGSPEDNEQKQLFVEQHKHYLDEIIEQISEFSKRVILADANLDKVLSAYNKHRDKPIREQAENIIHLFTLTNLGAPAAFKYFDTTIDRKRYTSTKEVLDATLIHQSITGLYETRIDLSQLGGD

SEQ ID NO: 854 - protein, 1693 aa, synthetic construct
METSVRHLGELTYPLRASAAFQRQALTGEPDLLTEIAAPDSLLNAWRYVFTRDAKDGYLLQQSQQIAADPDRFVAALSGALLSGRYQPEPQVEVLIPKKGKTSAMRELSIPSIRDRVVERAVLNAIIDRADLLQCSASFAFRRGLGVQAATHEITQLRDSGNRYVLLTDIANYFGRINIADSLRVLQRGLFCSRTLALLRFIAKPRRVVGRRRIRSRGLAQGSCLSPLLANLALTDIDFALADTGVGYVRFADDILLCAPSRTELAASQRLLASLAAHQGLQLNEEKTMHTSFDAGFCYLGVDFTAHQPVTDLHYGVKHTKQPAKVDKKYSIGLDIGTNSVGWAVITDEYKVPSKKFKVLGNTDRHSIKKNLIGALLFDSGETAEATRLKRTARRRYTRRKNRICYLQEIFSNEMAKVDDSFFHRLEESFLVEEDKKHERHPIFGNIVDEVAYHEKYPTIYHLRKKLVDSTDKADLRLIYLALAHMIKFRGHFLIEGDLNPDNSDVDKLFIQLVQTYNQLFEENPINASGVDAKAILSARLSKSRRLENLIAQLPGEKKNGLFGNLIALSLGLTPNFKSNFDLAEDAKLQLSKDTYDDDLDNLLAQIGDQYADLFLAAKNLSDAILLSDILRVNTEITKAPLSASMIKRYDEHHQDLTLLKALVRQQLPEKYKEIFFDQSKNGYAGYIDGGASQEEFYKFIKPILEKMDGTEELLVKLNREDLLRKQRTFDNGSIPHQIHLGELHAILRRQEDFYPFLKDNREKIEKILTFRIPYYVGPLARGNSRFAWMTRKSEETITPWNFEEVVDKGASAQSFIERMTNFDKNLPNEKVLPKHSLLYEYFTVYNELTKVKYVTEGMRKPAFLSGEQKKAIVDLLFKTNRKVTVKQLKEDYFKKIECFDSVEISGVEDRFNASLGTYHDLLKIIKDKDFLDNEENEDILEDIVLTLTLFEDREMIEERLKTYAHLFDDKVMKQLKRRRYTGWGRLSRKLINGIRDKQSGKTILDFLKSDGFANRNFMQLIHDDSLTFKEDIQKAQVSGQGDSLHEHIANLAGSPAIKKGILQTVKVVDELVKVMGRHKPENIVIEMARENQTTQKGQKNSRERMKRIEEGIKELGSQILKEHPVENTQLQNEKLYLYYLQNGRDMYVDQELDINRLSDYDVDAIVPQSFLKDDSIDNKVLTRSDKNRGKSDNVPSEEVVKKMKNYWRQLLNAKLITQRKFDNLTKAERGGLSELDKAGFIKRQLVETRQITKHVAQILDSRMNTKYDENDKLIREVKVITLKSKLVSDFRKDFQFYKVREINNYHHAHDAYLNAVVGTALIKKYPKLESEFVYGDYKVYDVRKMIAKSEQEIGKATAKYFFYSNIMNFFKTEITLANGEIRKRPLIETNGETGEIVWDKGRDFATVRKVLSMPQVNIVKKTEVQTGGFSKESILPKRNSDKLIARKKDWDPKKYGGFDSPTVAYSVLVVAKVEKGKSKKLKSVKELLGITIMERSSFEKNPIDFLEAKGYKEVKKDLIIKLPKYSLFELENGRKRMLASAGELQKGNELALPSKYVNFLYLASHYEKLKGSPEDNEQKQLFVEQHKHYLDEIIEQISEFSKRVILADANLDKVLSAYNKHRDKPIREQAENIIHLFTLTNLGAPAAFKYFDTTIDRKRYTSTKEVLDATLIHQSITGLYETRIDLSQLGGD

SEQ ID NO: 855 - protein, 677 aa, Moloney murine leukemia virus
TLNIEDEYRLHETSKEPDVSLGSTWLSDFPQAWAETGGMGLAVRQAPLIIPLKATSTPVSIKQYPMSQEARLGIKPHIQRLLDQGILVPCQSPWNTPLLPVKKPGTNDYRPVQDLREVNKRVEDIHPTVPNPYNLLSGLPPSHQWYTVLDLKDAFFCLRLHPTSQPLFAFEWRDPEMGISGQLTWTRLPQGFKNSPTLFDEALHRDLADFRIQHPDLILLQYVDDLLLAATSELDCQQGTRALLQTLGNLGYRASAKKAQICQKQVKYLGYLLKEGQRWLTEARKETVMGQPTPKTPRQLREFLGTAGFCRLWIPGFAEMAAPLYPLTKTGTLFNWGPDQQKAYQEIKQALLTAPALGLPDLTKPFELFVDEKQGYAKGVLTQKLGPWRRPVAYLSKKLDPVAAGWPPCLRMVAAIAVLTKDAGKLTMGQPLVILAPHAVEALVKQPPDRWLSNARMTHYQALLLDTDRVQFGPVVALNPATLLPLPEEGLQHNCLDILAEAHGTRPDLTDQPLPDADHTWYTDGSSLLQEGQRKAGAAVTTETEVIWAKALPAGTSAQRAELIALTQALKMAEGKKLNVYTDSRYAFATAHIHGEIYRRRGLLTSEGKEIKNKDEILALLKALFLPKRLSIIHCPGHQKGHSAEARGNRMADQAARKAAITETPDTSTLLIENSSP

SEQ ID NO: 856 - protein, 677 aa, synthetic construct
TLNIEDEYRLHETSKEPDVSLGSTWLSDFPQAWAETGGMGLAVRQAPLIIPLKATSTPVSIKQYPMSQEARLGIKPHIQRLLDQGILVPCQSPWNTPLLPVKKPGTNDYRPVQDLREVNKRVEDIHPTVPNPYNLLSGLPPSHQWYTVLDLKDAFFCLRLHPTSQPLFAFEWRDPEMGISGQLTWTRLPQGFKNSPTLFNEALHRDLADFRIQHPDLILLQYVDDLLLAATSELDCQQGTRALLQTLGNLGYRASAKKAQICQKQVKYLGYLLKEGQRWLTEARKETVMGQPTPKTPRQLREFLGKAGFCRLFIPGFAEMAAPLYPLTKPGTLFNWGPDQQKAYQEIKQALLTAPALGLPDLTKPFELFVDEKQGYAKGVLTQKLGPWRRPVAYLSKKLDPVAAGWPPCLRMVAAIAVLTKDAGKLTMGQPLVILAPHAVEALVKQPPDRWLSNARMTHYQALLLDTDRVQFGPVVALNPATLLPLPEEGLQHNCLDILAEAHGTRPDLTDQPLPDADHTWYTDGSSLLQEGQRKAGAAVTTETEVIWAKALPAGTSAQRAELIALTQALKMAEGKKLNVYTDSRYAFATAHIHGEIYRRRGWLTSEGKEIKNKDEILALLKALFLPKRLSIIHCPGHQKGHSAEARGNRMADQAARKAAITETPDTSTLLIENSSP

SEQ ID NO: 857 - protein, 677 aa, Moloney murine leukemia virus
TLNIEDEHRLHETSKEPDVSLGSTWLSDFPQAWAETGGMGLAVRQAPLIIPLKATSTPVSIKQYPMSQEARLGIKPHIQRLLDQGILVPCQSPWNTPLLPVKKPGTNDYRPVQDLREVNKRVEDIHPTVPNPYNLLSGLPPSHQWYTVLDLKDAFFCLRLHPTSQPLFAFEWRDPEMGISGQLTWTRLPQGFKNSPTLFDEALHRDLADFRIQHPDLILLQYVDDLLLAATSELDCQQGTRALLQTLGNLGYRASAKKAQICQKQVKYLGYLLKEGQRWLTEARKETVMGQPTPKTPRQLREFLGTAGFCRLWIPGFAEMAAPLYPLTKTGTLFNWGPDQQKAYQEIKQALLTAPALGLPDLTKPFELFVDEKQGYAKGVLTQKLGPWRRPVAYLSKKLDPVAAGWPPCLRMVAAIAVLTKDAGKLTMGQPLVILAPHAVEALVKQPPDRWLSNARMTHYQALLLDTDRVQFGPVVALNPATLLPLPEEGLQHNCLDILAEAHGTRPDLTDQPLPDADHTWYTDGSSLLQEGQRKAGAAVTTETEVIWAKALPAGTSAQRAELIALTQALKMAEGKKLNVYTDSRYAFATAHIHGEIYRRRGLLTSEGKEIKNKDEILALLKALFLPKRLSIIHCPGHQKGHSAEARGNRMADQAARKAAITETPDTSTLLIENSSP

SEQ ID NO: 858 - protein, 1053 aa, synthetic construct
MKRNYILGLDIGITSVGYGIIDYETRDVIDAGVRLFKEANVENNEGRRSKRGARRLKRRRRHRIQRVKKLLFDYNLLTDHSELSGINPYEARVKGLSQKLSEEEFSAALLHLAKRRGVHNVNEVEEDTGNELSTKEQISRNSKALEEKYVAELQLERLKKDGEVRGSINRFKTSDYVKEAKQLLKVQKAYHQLDQSFIDTYIDLLETRRTYYEGPGEGSPFGWKDIKEWYEMLMGHCTYFPEELRSVKYAYNADLYNALNDLNNLVITRDENEKLEYYEKFQIIENVFKQKKKPTLKQIAKEILVNEEDIKGYRVTSTGKPEFTNLKVYHDIKDITARKEIIENAELLDQIAKILTIYQSSEDIQEELTNLNSELTQEEIEQISNLKGYTGTHNLSLKAINLILDELWHTNDNQIAIFNRLKLVPKKVDLSQQKEIPTTLVDDFILSPVVKRSFIQSIKVINAIIKKYGLPNDIIIELAREKNSKDAQKMINEMQKRNRQTNERIEEIIRTTGKENAKYLIEKIKLHDMQEGKCLYSLEAIPLEDLLNNPFNYEVDHIIPRSVSFDNSFNNKVLVKQEENSKKGNRTPFQYLSSSDSKISYETFKKHILNLAKGKGRISKTKKEYLLEERDINRFSVQKDFINRNLVDTRYATRGLMNLLRSYFRVNNLDVKVKSINGGFTSFLRRKWKFKKERNKGYKHHAEDALIIANADFIFKEWKKLDKAKKVMENQMFEEKQAESMPEIETEQEYKEIFITPHQIKHIKDFKDYKYSHRVDKKPNRELINDTLYSTRKDDKGNTLIVNNLNGLYDKDNDKLKKLINKSPEKLLMYHHDPQTYQKLKLIMEQYGDEKNPLYKYYEETGNYLTKYSKKDNGPVIKKIKYYGNKLNAHLDITDDYPNSRNKVVKLSLKPYRFDVYLDNGVYKFVTVKNLDVIKKENYYEVNSKCYEEAKKLKKISNQAEFIASFYNNDLIKINGELYRVIGVNNDLLNRIEVNMIDITYREYLENMNDKRPPRIIKTIASKTQSIKKYSTDILGNLYEVKSKKHPQIIKKG

SEQ ID NO: 859 - RNA, 60 nt, synthetic construct
  source 1..60: mol_type = other RNA
gtcagggtcaggagccccccccctgaacccaggataaccctcaaagtcggggggcaaccc

SEQ ID NO: 860 - RNA, 56 nt, synthetic construct
  source 1..56: mol_type = other RNA
gggtcaggagccccccccctgaacccaggaaaaccctcaaagtcggggggcaaccc

SEQ ID NO: 861 - RNA, 56 nt, synthetic construct
  source 1..56: mol_type = other RNA
gggtcaggagccccccccctgcacccaggaaaaccctcaaagtcggggggcaaccc

SEQ ID NO: 862 - RNA, 56 nt, synthetic construct
  source 1..56: mol_type = other RNA
gggtcaggagccccccccctgcacccaggataaccctcaaagtcggggggcaaccc

SEQ ID NO: 863 - RNA, 60 nt, synthetic construct
  source 1..60: mol_type = other RNA
gtcagggtcaggagccccccccctgaacccaggaaaaccctcaaagtcggggggcaaccc

SEQ ID NO: 864 - RNA, 60 nt, synthetic construct
  source 1..60: mol_type = other RNA
gtcagggtcaggagccccccccctgcacccaggaaaaccctcaaagtcggggggcaaccc

SEQ ID NO: 865 - RNA, 51 nt, synthetic construct
  source 1..51: mol_type = other RNA
gggtcaggagccccccccctgaacccaggataaccctcaaagtcggggggc

SEQ ID NO: 866 - RNA, 13 nt, synthetic construct
  source 1..13: mol_type = other RNA
tggtggtggtggt

SEQ ID NO: 867 - RNA, 20 nt, synthetic construct
  source 1..20: mol_type = other RNA
gggacagggcagggacaggg

SEQ ID NO: 868 - RNA, 21 nt, synthetic construct
  source 1..21: mol_type = other RNA
gggtccgggtctgggtctggg

SEQ ID NO: 869 - RNA, 19 nt, synthetic construct
  source 1..19: mol_type = other RNA
gggcagggtctgggctggg

SEQ ID NO: 870 - RNA, 19 nt, synthetic construct
  source 1..19: mol_type = other RNA
gggctgggatgggaaaggg

SEQ ID NO: 871 - RNA, 19 nt, synthetic construct
  source 1..19: mol_type = other RNA
gggctctgggtgggccggg

SEQ ID NO: 872 - RNA, 18 nt, synthetic construct
  source 1..18: mol_type = other RNA
gggctgggctgggcaggg

SEQ ID NO: 873 - RNA, 17 nt, synthetic construct
  source 1..17: mol_type = other RNA
gggtgggctgggaaggg

SEQ ID NO: 874 - RNA, 17 nt, synthetic construct
  source 1..17: mol_type = other RNA
gggagggagggctaggg

SEQ ID NO: 875 - RNA, 17 nt, synthetic construct
  source 1..17: mol_type = other RNA
gggcagggctgggaggg

SEQ ID NO: 876 - RNA, 16 nt, synthetic construct
  source 1..16: mol_type = other RNA
gggtgggagggctggg

SEQ ID NO: 877 - RNA, 43 nt, synthetic construct
  source 1..43: mol_type = other RNA
gcgtaacctccatccgagttgcaagagagggaaacgcagtctc

SEQ ID NO: 878 - RNA, 160 nt, synthetic construct
  source 1..160: mol_type = other RNA
ggaattgcgggaaaggggtcaacagccgttcagtaccaagtctcaggggaaactttgagatggccttgcaaagggtatggtaataagctgacggacatggtcctaaccacgcagccaagtcctaagtcaacagatcttctgttgatatggatgcagttca

SEQ ID NO: 879 - RNA, 42 nt, synthetic construct
  source 1..42: mol_type = other RNA
ttgacgcggttctatctagttacgcgttaaaccaactagaaa

SEQ ID NO: 880 - RNA, 18 nt, synthetic construct
  source 1..18: mol_type = other RNA
ggtgggagacgtcccacc

SEQ ID NO: 881 - RNA, 44 nt, synthetic construct
  source 1..44: mol_type = other RNA
cgcgagtctaggggataacgcgttaaacttcctagaaggcggtt

SEQ ID NO: 882 - RNA, 44 nt, synthetic construct
  source 1..44: mol_type = other RNA
cgcggatctagattgtaacgcgttaaaccatctagaaggcggtt

SEQ ID NO: 883 - RNA, 44 nt, synthetic construct
  source 1..44: mol_type = other RNA
cgcgtcgctaccgcccggcgcgttaaacacactagaaggcggtt

SEQ ID NO: 884 - protein, 503 aa, synthetic construct
TLNIEDEYRLHETSKEPDVSLGSTWLSDFPQAWAETGGMGLAVRQAPLIIPLKATSTPVSIKQYPMSQEARLGIKPHIQRLLDQGILVPCQSPWNTPLLPVKKPGTNDYRPVQDLREVNKRVEDIHPTVPNPYNLLSGLPPSHQWYTVLDLKDAFFCLRLHPTSQPLFAFEWRDPEMGISGQLTWTRLPQGFKNSPTLFNEALHRDLADFRIQHPDLILLQYVDDLLLAATSELDCQQGTRALLQTLGNLGYRASAKKAQICQKQVKYLGYLLKEGQRWLTEARKETVMGQPTPKTPRQLREFLGKAGFCRLFIPGFAEMAAPLYPLTKPGTLFNWGPDQQKAYQEIKQALLTAPALGLPDLTKPFELFVDEKQGYAKGVLTQKLGPWRRPVAYLSKKLDPVAAGWPPCLRMVAAIAVLTKDAGKLTMGQPLVILAPHAVEALVKQPPDRWLSNARMTHYQALLLDTDRVQFGPVVALNPATLLPLPEEGLQHNCLDNSRLIN

SEQ ID NO: 885 - RNA, 37 nt, synthetic construct
  source 1..37: mol_type = other RNA
cgcggttctatctagttacgcgttaaaccaactagaa

SEQ ID NO: 886 - RNA, 68 nt, synthetic construct
  source 1..68: mol_type = other RNA
ggccggcatggtcccagcctcctcgctggcgccggctgggcaacatgcttcggcatggcgaatgggac

SEQ ID NO: 887 - skipped

SEQ ID NO: 888 - RNA, 24 nt, synthetic construct
  source 1..24: mol_type = other RNA
gagcagcatggcgtcgctgctcac

SEQ ID NO: 889 - RNA, 21 nt, synthetic construct
  source 1..21: mol_type = other RNA
ccatcagttgacaccctgagg

SEQ ID NO: 890 - RNA, 28 nt, synthetic construct
  source 1..28: mol_type = other RNA
gcagacctaagtggtgacatatggtctg

SEQ ID NO: 891 - RNA, 24 nt, synthetic construct
  source 1..24: mol_type = other RNA
catgcgattagaaataatcgcatg

SEQ ID NO: 892 - RNA, 118 nt, synthetic construct
  source 1..118: mol_type = other RNA
tctgccatcaaagctgcgaccgtgctcagtctggtgggagacgtcccaccggccggcatggtcccagcctcctcgctggcgccggctgggcaacatgcttcggcatggcgaatgggac

SEQ ID NO: 893 - RNA, 76 nt, synthetic construct
  source 1..76: mol_type = other RNA
gttttagagctatacgtagcaagttaaaataaggctagtccgttatcaactttacgaagtggcaccgagtcggtgc

SEQ ID NO: 894 - RNA, 76 nt, synthetic construct
  source 1..76: mol_type = other RNA
gttttagagctatacgtagcaagttaaaataaggctagtccgttatcaactttacgaagtgggaccgagtcggtcc

SEQ ID NO: 895 - RNA, 88 nt, synthetic construct
  source 1..88: mol_type = other RNA
gttttagagctagctcatgaaaatgagctagcaagttaaaataaggctagtccgttatcaacttgaaaaagtgggaccgagtcggtcc

SEQ ID NO: 896 - RNA, 76 nt, synthetic construct
  source 1..76: mol_type = other RNA
gtttgagagctagaaatagcaagtttaaataaggctagtccgttatcaacttgaaaaagtgggaccgagtcggtcc

SEQ ID NO: 897 - RNA, 76 nt, synthetic construct
  source 1..76: mol_type = other RNA
gtttaagagctagaaatagcaagtttaaataaggctagtccgttatcaacttgaaaaagtggcaccgagtcggtgc

SEQ ID NO: 898 - RNA, 86 nt, synthetic construct
  source 1..86: mol_type = other RNA
gttttagagctatgctggaaacagcatagcaagttaaaataaggctagtccgttatcaacttgaaaaagtggcaccgagtcggtgc

SEQ ID NO: 899 - RNA, 86 nt, synthetic construct
  source 1..86: mol_type = other RNA
gtttaagagctatgctggaaacagcatagcaagtttaaataaggctagtccgttatcaacttgaaaaagtggcaccgagtcggtgc

SEQ ID NO: 900 - RNA, 75 nt, synthetic construct
  source 1..75: mol_type = other RNA
  misc_difference 72..75: note = Nucleotide may be delete
ggccggcatggtcccagcctcctcgctggcgccggctgggcaacatgcttcggcatggcgaatgggacttttttt

SEQ ID NO: 901 - RNA, 16 nt, synthetic construct
  source 1..16: mol_type = other RNA
tgggagacgtcccacc

SEQ ID NO: 902 - RNA, 23 nt, synthetic construct
  source 1..23: mol_type = other RNA
  misc_difference 20..23: note = Nucleotide may be delete
tgggagacgtcccaccttttttt

SEQ ID NO: 903 - RNA, 28 nt, synthetic construct
  source 1..28: mol_type = other RNA
  misc_difference 25..28: note = Nucleotide may be delete
ccatcagttgacaccctgaggttttttt

SEQ ID NO: 904 - RNA, 31 nt, synthetic construct
  source 1..31: mol_type = other RNA
  misc_difference 28..31: note = Nucleotide may be delete
catgcgattagaaataatcgcatgttttttt

SEQ ID NO: 905 - protein, 9 aa, synthetic construct
  VARIANT 3..6: note = Any amino acid
PPXXXXIPK

SEQ ID NO: 906 - protein, 4 aa, synthetic construct
QAIL

SEQ ID NO: 907 - protein, 10 aa, synthetic construct
  VARIANT 2: note = Any amino acid
  VARIANT 7..8: note = Any amino acid
RXLGIPXXDR

SEQ ID NO: 908 - protein, 5 aa, synthetic construct
GTQGG

SEQ ID NO: 909 - protein, 5 aa, synthetic construct
ELERR

SEQ ID NO: 910 - protein, 13 aa, synthetic construct
YTRXXYXXDDXXS

SEQ ID NO: 911 - RNA, 33 nt, synthetic construct
  source 1..33: mol_type = other RNA
gccaacatgaggatcacccatgtctgcagggcc

SEQ ID NO: 912 - protein, 131 aa, synthetic construct
GSASNFTQFVLVDNGGTGDVTVAPSNFANGVAEWISSNSRSQAYKVTCSVRQSSAQNRKYTIKVEVPKVATQTVGGEELPVAGWRSYLNMELTIPIFATNSDCELIVKAMQGLLKDGNPIPSAIAANSGIY

SEQ ID NO: 913 - protein, 145 aa, synthetic construct
  VARIANT 6..145: note = GGGGS repeats may be deleted
GGGGSGGGGSGGGGSGGGGSGGGGSGGGGSGGGGSGGGGSGGGGSGGGGSGGGGSGGGGSGGGGSGGGGSGGGGSGGGGSGGGGSGGGGSGGGGSGGGGSGGGGSGGGGSGGGGSGGGGSGGGGSGGGGSGGGGSGGGGSGGGGS

SEQ ID NO: 914 - protein, 30 aa, synthetic construct
  VARIANT 2..30: note = Residues may be deleted
GGGGGGGGGGGGGGGGGGGGGGGGGGGGGG

SEQ ID NO: 915 - protein, 150 aa, synthetic construct
  VARIANT 6..145: note = EAAAK repeats may be deleted
EAAAKEAAAKEAAAKEAAAKEAAAKEAAAKEAAAKEAAAKEAAAKEAAAKEAAAKEAAAKEAAAKEAAAKEAAAKEAAAKEAAAKEAAAKEAAAKEAAAKEAAAKEAAAKEAAAKEAAAKEAAAKEAAAKEAAAKEAAAKEAAAKEAAAK

SEQ ID NO: 916 - protein, 90 aa, synthetic construct
  VARIANT 4..90: note = GGS repeats may be deleted
GGSGGSGGSGGSGGSGGSGGSGGSGGSGGSGGSGGSGGSGGSGGSGGSGGSGGSGGSGGSGGSGGSGGSGGSGGSGGSGGSGGSGGSGGS

SEQ ID NO: 917 - protein, 120 aa, synthetic construct
  VARIANT 5..120: note = SGGS repeats may be deleted
SGGSSGGSSGGSSGGSSGGSSGGSSGGSSGGSSGGSSGGSSGGSSGGSSGGSSGGSSGGSSGGSSGGSSGGSSGGSSGGSSGGSSGGSSGGSSGGSSGGSSGGSSGGSSGGSSGGSSGGS

SEQ ID NO: 918 - protein, 60 aa, synthetic construct
  VARIANT 1: note = Any amino acid
  VARIANT 3: note = Any amino acid
  VARIANT 5: note = Any amino acid
  VARIANT 7: note = Any amino acid
  VARIANT 9: note = Any amino acid
  VARIANT 11: note = Any amino acid
  VARIANT 13: note = Any amino acid
  VARIANT 15: note = Any amino acid
  VARIANT 17: note = Any amino acid
  VARIANT 19: note = Any amino acid
  VARIANT 21: note = Any amino acid
  VARIANT 23: note = Any amino acid
  VARIANT 25: note = Any amino acid
  VARIANT 27: note = Any amino acid
  VARIANT 29: note = Any amino acid
  VARIANT 31: note = Any amino acid
  VARIANT 33: note = Any amino acid
  VARIANT 35: note = Any amino acid
  VARIANT 37: note = Any amino acid
  VARIANT 39: note = Any amino acid
  VARIANT 41: note = Any amino acid
  VARIANT 43: note = Any amino acid
  VARIANT 45: note = Any amino acid
  VARIANT 47: note = Any amino acid
  VARIANT 49: note = Any amino acid
  VARIANT 51: note = Any amino acid
  VARIANT 53: note = Any amino acid
  VARIANT 55: note = Any amino acid
  VARIANT 57: note = Any amino acid
  VARIANT 59: note = Any amino acid
  VARIANT 3..60: note = XP repeats may be deleted
XPXPXPXPXPXPXPXPXPXPXPXPXPXPXPXPXPXPXPXPXPXPXPXPXPXPXPXPXPXP

SEQ ID NO: 919 - protein, 21 aa, synthetic construct
  VARIANT 4..21: note = GGS repeats may be deleted
GGSGGSGGSGGSGGSGGSGGS

SEQ ID NO: 920 - protein, 16 aa, synthetic construct
SGSETPGTSESATPES

SEQ ID NO: 921 - protein, 32 aa, synthetic construct
SGGSSGGSSGSETPGTSESATPESSGGSSGGS

SEQ ID NO: 922 - protein, 16 aa, synthetic construct
  VARIANT 3..12: note = Any amino acid
KRXXXXXXXXXXKKKL

SEQ ID NO: 923 - protein, 4 aa, synthetic construct
SGGS

SEQ ID NO: 924 - protein, 60 aa, synthetic construct
SGGSSGGSSGSETPGTSESATPESAGSYPYDVPDYAGSAAPAAKKKKLDGSGSGGSSGGS

SEQ ID NO: 925 - protein, 6 aa, synthetic construct
GGSGGS

SEQ ID NO: 926 - protein, 9 aa, synthetic construct
GGSGGSGGS

SEQ ID NO: 927 - protein, 18 aa, synthetic construct
KRTADGSEFESPKKKRKV

SEQ ID NO: 928 - protein, 17 aa, synthetic construct
KRTADGSEFEPKKKRKV

SEQ ID NO: 929 - protein, 19 aa, synthetic construct
NLSKRPAAIKKAGQAKKKK

SEQ ID NO: 930 - protein, 11 aa, synthetic construct
RQRRNELKRSF

SEQ ID NO: 931 - protein, 38 aa, synthetic construct
NQSSNFGPMKGGNFGGRSSGPYGGGGQYFAKPRNQGGY

SEQ ID NO: 932 - skipped

SEQ ID NO: 933 - RNA, 76 nt, synthetic construct
  source 1..76: mol_type = other RNA
gttttagagctagaaatagcaagttaaaataaggctagtccgttatcaacttgaaaaagtggcaccgagtcggtgc

SEQ ID NO: 934 - RNA, 30 nt, synthetic construct
  source 1..30: mol_type = other RNA
aacattgacgcgtctctacgtgggggcgcg

SEQ ID NO: 935 - RNA, 55 nt, synthetic construct
  source 1..55: mol_type = other RNA
gggtcaggagccccccccctgaacccaggataaccctcaaagtcggggggcaacc

SEQ ID NO: 936 - protein, 16 aa, Drosophila melanogaster
RQIKIWFQNRRMKWKK

SEQ ID NO: 937 - skipped

SEQ ID NO: 938 - protein, 8 aa, synthetic construct
RRRRRRRR

SEQ ID NO: 939 - protein, 2117 aa, synthetic construct
MKRTADGSEFESPKKKRKVDKKYSIGLDIGTNSVGWAVITDEYKVPSKKFKVLGNTDRHSIKKNLIGALLFDSGETAEATRLKRTARRRYTRRKNRICYLQEIFSNEMAKVDDSFFHRLEESFLVEEDKKHERHPIFGNIVDEVAYHEKYPTIYHLRKKLVDSTDKADLRLIYLALAHMIKFRGHFLIEGDLNPDNSDVDKLFIQLVQTYNQLFEENPINASGVDAKAILSARLSKSRRLENLIAQLPGEKKNGLFGNLIALSLGLTPNFKSNFDLAEDAKLQLSKDTYDDDLDNLLAQIGDQYADLFLAAKNLSDAILLSDILRVNTEITKAPLSASMIKRYDEHHQDLTLLKALVRQQLPEKYKEIFFDQSKNGYAGYIDGGASQEEFYKFIKPILEKMDGTEELLVKLNREDLLRKQRTFDNGSIPHQIHLGELHAILRRQEDFYPFLKDNREKIEKILTFRIPYYVGPLARGNSRFAWMTRKSEETITPWNFEEVVDKGASAQSFIERMTNFDKNLPNEKVLPKHSLLYEYFTVYNELTKVKYVTEGMRKPAFLSGEQKKAIVDLLFKTNRKVTVKQLKEDYFKKIECFDSVEISGVEDRFNASLGTYHDLLKIIKDKDFLDNEENEDILEDIVLTLTLFEDREMIEERLKTYAHLFDDKVMKQLKRRRYTGWGRLSRKLINGIRDKQSGKTILDFLKSDGFANRNFMQLIHDDSLTFKEDIQKAQVSGQGDSLHEHIANLAGSPAIKKGILQTVKVVDELVKVMGRHKPENIVIEMARENQTTQKGQKNSRERMKRIEEGIKELGSQILKEHPVENTQLQNEKLYLYYLQNGRDMYVDQELDINRLSDYDVDAIVPQSFLKDDSIDNKVLTRSDKNRGKSDNVPSEEVVKKMKNYWRQLLNAKLITQRKFDNLTKAERGGLSELDKAGFIKRQLVETRQITKHVAQILDSRMNTKYDENDKLIREVKVITLKSKLVSDFRKDFQFYKVREINNYHHAHDAYLNAVVGTALIKKYPKLESEFVYGDYKVYDVRKMIAKSEQEIGKATAKYFFYSNIMNFFKTEITLANGEIRKRPLIETNGETGEIVWDKGRDFATVRKVLSMPQVNIVKKTEVQTGGFSKESILPKRNSDKLIARKKDWDPKKYGGFDSPTVAYSVLVVAKVEKGKSKKLKSVKELLGITIMERSSFEKNPIDFLEAKGYKEVKKDLIIKLPKYSLFELENGRKRMLASAGELQKGNELALPSKYVNFLYLASHYEKLKGSPEDNEQKQLFVEQHKHYLDEIIEQISEFSKRVILADANLDKVLSAYNKHRDKPIREQAENIIHLFTLTNLGAPAAFKYFDTTIDRKRYTSTKEVLDATLIHQSITGLYETRIDLSQLGGDSGGSSGGSSGSETPGTSESATPESSGGSSGGSSTLNIEDEHRLHETSKEPDVSLGSTWLSDFPQAWAETGGMGLAVRQAPLIIPLKATSTPVSIKQYPMSQEARLGIKPHIQRLLDQGILVPCQSPWNTPLLPVKKPGTNDYRPVQDLREVNKRVEDIHPTVPNPYNLLSGLPPSHQWYTVLDLKDAFFCLRLHPTSQPLFAFEWRDPEMGISGQLTWTRLPQGFKNSPTLFDEALHRDLADFRIQHPDLILLQYVDDLLLAATSELDCQQGTRALLQTLGNLGYRASAKKAQICQKQVKYLGYLLKEGQRWLTEARKETVMGQPTPKTPRQLREFLGTAGFCRLWIPGFAEMAAPLYPLTKTGTLFNWGPDQQKAYQEIKQALLTAPALGLPDLTKPFELFVDEKQGYAKGVLTQKLGPWRRPVAYLSKKLDPVAAGWPPCLRMVAAIAVLTKDAGKLTMGQPLVILAPHAVEALVKQPPDRWLSNARMTHYQALLLDTDRVQFGPVVALNPATLLPLPEEGLQHNCLDILAEAHGTRPDLTDQPLPDADHTWYTDGSSLLQEGQRKAGAAVTTETEVIWAKALPAGTSAQRAELIALTQALKMAEGKKLNVYTDSRYAFATAHIHGEIYRRRGLLTSEGKEIKNKDEILALLKALFLPKRLSIIHCPGHQKGHSAEARGNRMADQAARKAAITETPDTSTLLIENSSPSGGSKRTADGSEFEPKKKRKV

SEQ ID NO: 940 - protein, 1777 aa, synthetic construct
MKRTADGSEFESPKKKRKVDKKYSIGLDIGTNSVGWAVITDEYKVPSKKFKVLGNTDRHSIKKNLIGALLFDSGETAEATRLKRTARRRYTRRKNRICYLQEIFSNEMAKVDDSFFHRLEESFLVEEDKKHERHPIFGNIVDEVAYHEKYPTIYHLRKKLVDSTDKADLRLIYLALAHMIKFRGHFLIEGDLNPDNSDVDKLFIQLVQTYNQLFEENPINASGVDAKAILSARLSKSRRLENLIAQLPGEKKNGLFGNLIALSLGLTPNFKSNFDLAEDAKLQLSKDTYDDDLDNLLAQIGDQYADLFLAAKNLSDAILLSDILRVNTEITKAPLSASMIKRYDEHHQDLTLLKALVRQQLPEKYKEIFFDQSKNGYAGYIDGGASQEEFYKFIKPILEKMDGTEELLVKLNREDLLRKQRTFDNGSIPHQIHLGELHAILRRQEDFYPFLKDNREKIEKILTFRIPYYVGPLARGNSRFAWMTRKSEETITPWNFEEVVDKGASAQSFIERMTNFDKNLPNEKVLPKHSLLYEYFTVYNELTKVKYVTEGMRKPAFLSGEQKKAIVDLLFKTNRKVTVKQLKEDYFKKIECFDSVEISGVEDRFNASLGTYHDLLKIIKDKDFLDNEENEDILEDIVLTLTLFEDREMIEERLKTYAHLFDDKVMKQLKRRRYTGWGRLSRKLINGIRDKQSGKTILDFLKSDGFANRNFMQLIHDDSLTFKEDIQKAQVSGQGDSLHEHIANLAGSPAIKKGILQTVKVVDELVKVMGRHKPENIVIEMARENQTTQKGQKNSRERMKRIEEGIKELGSQILKEHPVENTQLQNEKLYLYYLQNGRDMYVDQELDINRLSDYDVDAIVPQSFLKDDSIDNKVLTRSDKNRGKSDNVPSEEVVKKMKNYWRQLLNAKLITQRKFDNLTKAERGGLSELDKAGFIKRQLVETRQITKHVAQILDSRMNTKYDENDKLIREVKVITLKSKLVSDFRKDFQFYKVREINNYHHAHDAYLNAVVGTALIKKYPKLESEFVYGDYKVYDVRKMIAKSEQEIGKATAKYFFYSNIMNFFKTEITLANGEIRKRPLIETNGETGEIVWDKGRDFATVRKVLSMPQVNIVKKTEVQTGGFSKESILPKRNSDKLIARKKDWDPKKYGGFDSPTVAYSVLVVAKVEKGKSKKLKSVKELLGITIMERSSFEKNPIDFLEAKGYKEVKKDLIIKLPKYSLFELENGRKRMLASAGELQKGNELALPSKYVNFLYLASHYEKLKGSPEDNEQKQLFVEQHKHYLDEIIEQISEFSKRVILADANLDKVLSAYNKHRDKPIREQAENIIHLFTLTNLGAPAAFKYFDTTIDRKRYTSTKEVLDATLIHQSITGLYETRIDLSQLGGDSGGSSGGSSGSETPGTSESATPESSGGSSGGSSEKIENEIVNKTYLAINSLEELRNMIGIKSDYFYKCLYVNDHFYNVIKIPKRKKDEYRELMIPNMALKNIQRWILDNVLYRRQVHKCATGFVPRKSIVNNAIPHVGQKYILKMDIENFFPSITFKQVRKIFSEMGYKFELATALANLCTVNNQLPQGAPTSPYIANIIFYNIDKRIFSYCQKNNLRYTRYADDITISGSNKVSFSKEIIREIVNQYNFRINESKTIMFKPGDRKKVTGIIVNEKISVPKTLIREVRKQIYFVNKFGLEEHLIRNNYSLDYEQQFIMSIYGKISFIKMIDFKKGVSLQKKFNEVLGNIESSNMYRDNIDFDDIELHWINSGGSKRTADGSEFEPKKKRKV

SEQ ID NO: 941 - protein, 1696 aa, synthetic construct
MKRTADGSEFESPKKKRKVDKKYSIGLDIGTNSVGWAVITDEYKVPSKKFKVLGNTDRHSIKKNLIGALLFDSGETAEATRLKRTARRRYTRRKNRICYLQEIFSNEMAKVDDSFFHRLEESFLVEEDKKHERHPIFGNIVDEVAYHEKYPTIYHLRKKLVDSTDKADLRLIYLALAHMIKFRGHFLIEGDLNPDNSDVDKLFIQLVQTYNQLFEENPINASGVDAKAILSARLSKSRRLENLIAQLPGEKKNGLFGNLIALSLGLTPNFKSNFDLAEDAKLQLSKDTYDDDLDNLLAQIGDQYADLFLAAKNLSDAILLSDILRVNTEITKAPLSASMIKRYDEHHQDLTLLKALVRQQLPEKYKEIFFDQSKNGYAGYIDGGASQEEFYKFIKPILEKMDGTEELLVKLNREDLLRKQRTFDNGSIPHQIHLGELHAILRRQEDFYPFLKDNREKIEKILTFRIPYYVGPLARGNSRFAWMTRKSEETITPWNFEEVVDKGASAQSFIERMTNFDKNLPNEKVLPKHSLLYEYFTVYNELTKVKYVTEGMRKPAFLSGEQKKAIVDLLFKTNRKVTVKQLKEDYFKKIECFDSVEISGVEDRFNASLGTYHDLLKIIKDKDFLDNEENEDILEDIVLTLTLFEDREMIEERLKTYAHLFDDKVMKQLKRRRYTGWGRLSRKLINGIRDKQSGKTILDFLKSDGFANRNFMQLIHDDSLTFKEDIQKAQVSGQGDSLHEHIANLAGSPAIKKGILQTVKVVDELVKVMGRHKPENIVIEMARENQTTQKGQKNSRERMKRIEEGIKELGSQILKEHPVENTQLQNEKLYLYYLQNGRDMYVDQELDINRLSDYDVDAIVPQSFLKDDSIDNKVLTRSDKNRGKSDNVPSEEVVKKMKNYWRQLLNAKLITQRKFDNLTKAERGGLSELDKAGFIKRQLVETRQITKHVAQILDSRMNTKYDENDKLIREVKVITLKSKLVSDFRKDFQFYKVREINNYHHAHDAYLNAVVGTALIKKYPKLESEFVYGDYKVYDVRKMIAKSEQEIGKATAKYFFYSNIMNFFKTEITLANGEIRKRPLIETNGETGEIVWDKGRDFATVRKVLSMPQVNIVKKTEVQTGGFSKESILPKRNSDKLIARKKDWDPKKYGGFDSPTVAYSVLVVAKVEKGKSKKLKSVKELLGITIMERSSFEKNPIDFLEAKGYKEVKKDLIIKLPKYSLFELENGRKRMLASAGELQKGNELALPSKYVNFLYLASHYEKLKGSPEDNEQKQLFVEQHKHYLDEIIEQISEFSKRVILADANLDKVLSAYNKHRDKPIREQAENIIHLFTLTNLGAPAAFKYFDTTIDRKRYTSTKEVLDATLIHQSITGLYETRIDLSQLGGDSGGSSGGSSGSETPGTSESATPESSGGSSGGSSTIEVQRWEDKFEIKPGVWVYVPSVEARKVGGKILQAVRNKWIPPLYFYHLRTGGHLKAARLHLKSDFFAVVDIKQFFQSTSRSRITRDLKSYFTYSQAREISTFSTVRNLSHSPHKHVLPFGFVQSPILATLCLDKSYFGSLLRRLNKHHDLKLSVFMDDVIISSNNLAQLQAAYDEALVAMRKSGYQANMSKTQAPSSKISVFNLTLSKGVMKVTSQKMSDFLIDFYSSNYEPHRIGVKNYVEAVNPGQAKLFKLSGGSKRTADGSEFEPKKKRKV

SEQ ID NO: 942 - protein, 1759 aa, synthetic construct
MKRTADGSEFESPKKKRKVDKKYSIGLDIGTNSVGWAVITDEYKVPSKKFKVLGNTDRHSIKKNLIGALLFDSGETAEATRLKRTARRRYTRRKNRICYLQEIFSNEMAKVDDSFFHRLEESFLVEEDKKHERHPIFGNIVDEVAYHEKYPTIYHLRKKLVDSTDKADLRLIYLALAHMIKFRGHFLIEGDLNPDNSDVDKLFIQLVQTYNQLFEENPINASGVDAKAILSARLSKSRRLENLIAQLPGEKKNGLFGNLIALSLGLTPNFKSNFDLAEDAKLQLSKDTYDDDLDNLLAQIGDQYADLFLAAKNLSDAILLSDILRVNTEITKAPLSASMIKRYDEHHQDLTLLKALVRQQLPEKYKEIFFDQSKNGYAGYIDGGASQEEFYKFIKPILEKMDGTEELLVKLNREDLLRKQRTFDNGSIPHQIHLGELHAILRRQEDFYPFLKDNREKIEKILTFRIPYYVGPLARGNSRFAWMTRKSEETITPWNFEEVVDKGASAQSFIERMTNFDKNLPNEKVLPKHSLLYEYFTVYNELTKVKYVTEGMRKPAFLSGEQKKAIVDLLFKTNRKVTVKQLKEDYFKKIECFDSVEISGVEDRFNASLGTYHDLLKIIKDKDFLDNEENEDILEDIVLTLTLFEDREMIEERLKTYAHLFDDKVMKQLKRRRYTGWGRLSRKLINGIRDKQSGKTILDFLKSDGFANRNFMQLIHDDSLTFKEDIQKAQVSGQGDSLHEHIANLAGSPAIKKGILQTVKVVDELVKVMGRHKPENIVIEMARENQTTQKGQKNSRERMKRIEEGIKELGSQILKEHPVENTQLQNEKLYLYYLQNGRDMYVDQELDINRLSDYDVDAIVPQSFLKDDSIDNKVLTRSDKNRGKSDNVPSEEVVKKMKNYWRQLLNAKLITQRKFDNLTKAERGGLSELDKAGFIKRQLVETRQITKHVAQILDSRMNTKYDENDKLIREVKVITLKSKLVSDFRKDFQFYKVREINNYHHAHDAYLNAVVGTALIKKYPKLESEFVYGDYKVYDVRKMIAKSEQEIGKATAKYFFYSNIMNFFKTEITLANGEIRKRPLIETNGETGEIVWDKGRDFATVRKVLSMPQVNIVKKTEVQTGGFSKESILPKRNSDKLIARKKDWDPKKYGGFDSPTVAYSVLVVAKVEKGKSKKLKSVKELLGITIMERSSFEKNPIDFLEAKGYKEVKKDLIIKLPKYSLFELENGRKRMLASAGELQKGNELALPSKYVNFLYLASHYEKLKGSPEDNEQKQLFVEQHKHYLDEIIEQISEFSKRVILADANLDKVLSAYNKHRDKPIREQAENIIHLFTLTNLGAPAAFKYFDTTIDRKRYTSTKEVLDATLIHQSITGLYETRIDLSQLGGDSGGSSGGSSGSETPGTSESATPESSGGSSGGSSKSAEYLNTFRLRNLGLPVMNNLHDMSKATRISVETLRLLIYTADFRYRIYTVEKKGPEKRMRTIYQPSRELKALQGWVLRNILDKLSSSPFSIGFEKHQSILNNATPHIGANFILNIDLEDFFPSLTANKVFGVFHSLGYNRLISSVLTKICCYKNLLPQGAPSSPKLANLICSKLDYRIQGYAGSRGLIYTRYADDLTLSAQSMKKVVKARDFLFSIIPSEGLVINSKKTCISGPRSQRKVTGLVISQEKVGIGREKYKEIRAKIHHIFCGKSSEIEHVRGWLSFILSVDSKSHRRLIAYISKLEKKYGKNPLNKAKTSGGSKRTADGSEFEPKKKRKV

SEQ ID NO: 943 - protein, 1809 aa, synthetic construct
MKRTADGSEFESPKKKRKVDKKYSIGLDIGTNSVGWAVITDEYKVPSKKFKVLGNTDRHSIKKNLIGALLFDSGETAEATRLKRTARRRYTRRKNRICYLQEIFSNEMAKVDDSFFHRLEESFLVEEDKKHERHPIFGNIVDEVAYHEKYPTIYHLRKKLVDSTDKADLRLIYLALAHMIKFRGHFLIEGDLNPDNSDVDKLFIQLVQTYNQLFEENPINASGVDAKAILSARLSKSRRLENLIAQLPGEKKNGLFGNLIALSLGLTPNFKSNFDLAEDAKLQLSKDTYDDDLDNLLAQIGDQYADLFLAAKNLSDAILLSDILRVNTEITKAPLSASMIKRYDEHHQDLTLLKALVRQQLPEKYKEIFFDQSKNGYAGYIDGGASQEEFYKFIKPILEKMDGTEELLVKLNREDLLRKQRTFDNGSIPHQIHLGELHAILRRQEDFYPFLKDNREKIEKILTFRIPYYVGPLARGNSRFAWMTRKSEETITPWNFEEVVDKGASAQSFIERMTNFDKNLPNEKVLPKHSLLYEYFTVYNELTKVKYVTEGMRKPAFLSGEQKKAIVDLLFKTNRKVTVKQLKEDYFKKIECFDSVEISGVEDRFNASLGTYHDLLKIIKDKDFLDNEENEDILEDIVLTLTLFEDREMIEERLKTYAHLFDDKVMKQLKRRRYTGWGRLSRKLINGIRDKQSGKTILDFLKSDGFANRNFMQLIHDDSLTFKEDIQKAQVSGQGDSLHEHIANLAGSPAIKKGILQTVKVVDELVKVMGRHKPENIVIEMARENQTTQKGQKNSRERMKRIEEGIKELGSQILKEHPVENTQLQNEKLYLYYLQNGRDMYVDQELDINRLSDYDVDAIVPQSFLKDDSIDNKVLTRSDKNRGKSDNVPSEEVVKKMKNYWRQLLNAKLITQRKFDNLTKAERGGLSELDKAGFIKRQLVETRQITKHVAQILDSRMNTKYDENDKLIREVKVITLKSKLVSDFRKDFQFYKVREINNYHHAHDAYLNAVVGTALIKKYPKLESEFVYGDYKVYDVRKMIAKSEQEIGKATAKYFFYSNIMNFFKTEITLANGEIRKRPLIETNGETGEIVWDKGRDFATVRKVLSMPQVNIVKKTEVQTGGFSKESILPKRNSDKLIARKKDWDPKKYGGFDSPTVAYSVLVVAKVEKGKSKKLKSVKELLGITIMERSSFEKNPIDFLEAKGYKEVKKDLIIKLPKYSLFELENGRKRMLASAGELQKGNELALPSKYVNFLYLASHYEKLKGSPEDNEQKQLFVEQHKHYLDEIIEQISEFSKRVILADANLDKVLSAYNKHRDKPIREQAENIIHLFTLTNLGAPAAFKYFDTTIDRKRYTSTKEVLDATLIHQSITGLYETRIDLSQLGGDSGGSSGGSSGSETPGTSESATPESSGGSSGGSSELLLGIVIVVTCWMVVRIIRSSKNQEGYKRWRAGNYASENPYAKEKASGPLSQGLFSKRVRTTGARRFDDGAIRWCANLLATEESRLREVLDYIPRQYTCFHVRKRSGGFRYISAPAGDFRSMQQTIYHRILLLANIHPAVTGFCPGKSVSDNARVHLGRKNVLKVDLHDFFPSIRSPRVRAAFREMGYSRPIAKVLAELCCLRCCLPQGAPTSPALSNIIAYPMDKKMMALAGEYGLVYTRYADDLTFSGDYLPKDEVLVRIHRIIREEGFTMNVKKTRFLSEHKRKIITGVSVSSGKKMTLPKVKKREIRKNVHYVLTKGLVGHQEHIGSTDPVYLKRLLGSLCYWRSIEPDNRYVSDSITALKRLMSGGSKRTADGSEFEPKKKRKV

SEQ ID NO: 944 - protein, 1822 aa, synthetic construct
MKRTADGSEFESPKKKRKVDKKYSIGLDIGTNSVGWAVITDEYKVPSKKFKVLGNTDRHSIKKNLIGALLFDSGETAEATRLKRTARRRYTRRKNRICYLQEIFSNEMAKVDDSFFHRLEESFLVEEDKKHERHPIFGNIVDEVAYHEKYPTIYHLRKKLVDSTDKADLRLIYLALAHMIKFRGHFLIEGDLNPDNSDVDKLFIQLVQTYNQLFEENPINASGVDAKAILSARLSKSRRLENLIAQLPGEKKNGLFGNLIALSLGLTPNFKSNFDLAEDAKLQLSKDTYDDDLDNLLAQIGDQYADLFLAAKNLSDAILLSDILRVNTEITKAPLSASMIKRYDEHHQDLTLLKALVRQQLPEKYKEIFFDQSKNGYAGYIDGGASQEEFYKFIKPILEKMDGTEELLVKLNREDLLRKQRTFDNGSIPHQIHLGELHAILRRQEDFYPFLKDNREKIEKILTFRIPYYVGPLARGNSRFAWMTRKSEETITPWNFEEVVDKGASAQSFIERMTNFDKNLPNEKVLPKHSLLYEYFTVYNELTKVKYVTEGMRKPAFLSGEQKKAIVDLLFKTNRKVTVKQLKEDYFKKIECFDSVEISGVEDRFNASLGTYHDLLKIIKDKDFLDNEENEDILEDIVLTLTLFEDREMIEERLKTYAHLFDDKVMKQLKRRRYTGWGRLSRKLINGIRDKQSGKTILDFLKSDGFANRNFMQLIHDDSLTFKEDIQKAQVSGQGDSLHEHIANLAGSPAIKKGILQTVKVVDELVKVMGRHKPENIVIEMARENQTTQKGQKNSRERMKRIEEGIKELGSQILKEHPVENTQLQNEKLYLYYLQNGRDMYVDQELDINRLSDYDVDAIVPQSFLKDDSIDNKVLTRSDKNRGKSDNVPSEEVVKKMKNYWRQLLNAKLITQRKFDNLTKAERGGLSELDKAGFIKRQLVETRQITKHVAQILDSRMNTKYDENDKLIREVKVITLKSKLVSDFRKDFQFYKVREINNYHHAHDAYLNAVVGTALIKKYPKLESEFVYGDYKVYDVRKMIAKSEQEIGKATAKYFFYSNIMNFFKTEITLANGEIRKRPLIETNGETGEIVWDKGRDFATVRKVLSMPQVNIVKKTEVQTGGFSKESILPKRNSDKLIARKKDWDPKKYGGFDSPTVAYSVLVVAKVEKGKSKKLKSVKELLGITIMERSSFEKNPIDFLEAKGYKEVKKDLIIKLPKYSLFELENGRKRMLASAGELQKGNELALPSKYVNFLYLASHYEKLKGSPEDNEQKQLFVEQHKHYLDEIIEQISEFSKRVILADANLDKVLSAYNKHRDKPIREQAENIIHLFTLTNLGAPAAFKYFDTTIDRKRYTSTKEVLDATLIHQSITGLYETRIDLSQLGGDSGGSSGGSSGSETPGTSESATPESSGGSSGGSSAGMPGFVSAWRSEQPPRVVRVLTRPPFQRPPPPWLHDVALPQLPTLGDLAAWLDIEPGDLGWFADRWRVPTRGAATPLHHYAYKAIEKRDGRCRIIEIPKPRLRALQRKVLSGLLDRIPAHESVHGFRHGRNIVTFAAPHVGKAVVMRFDLTDFFASVHAGRVYSAFYALGYPQAVARALTALCTNRIPSGRLLAPDVRERIDWRERQRYRNRHLPQGAPTSPALANLCAFRLDLRLAGLARSVGATYTRYADDLAFSGDEELARMADRLCIRVAAIALEEGFGVNLRKTRVMRRSARQHLAGVVVNSHANVARPEFDALKAVLTNCVRHGWRSQNRDDLADFRAHLAGRVAHVAMVNAVRGARLRAVFERIEWEEEKPLDASGGSKRTADGSEFEPKKKRKV

SEQ ID NO: 945 - protein, 1788 aa, synthetic construct
MKRTADGSEFESPKKKRKVDKKYSIGLDIGTNSVGWAVITDEYKVPSKKFKVLGNTDRHSIKKNLIGALLFDSGETAEATRLKRTARRRYTRRKNRICYLQEIFSNEMAKVDDSFFHRLEESFLVEEDKKHERHPIFGNIVDEVAYHEKYPTIYHLRKKLVDSTDKADLRLIYLALAHMIKFRGHFLIEGDLNPDNSDVDKLFIQLVQTYNQLFEENPINASGVDAKAILSARLSKSRRLENLIAQLPGEKKNGLFGNLIALSLGLTPNFKSNFDLAEDAKLQLSKDTYDDDLDNLLAQIGDQYADLFLAAKNLSDAILLSDILRVNTEITKAPLSASMIKRYDEHHQDLTLLKALVRQQLPEKYKEIFFDQSKNGYAGYIDGGASQEEFYKFIKPILEKMDGTEELLVKLNREDLLRKQRTFDNGSIPHQIHLGELHAILRRQEDFYPFLKDNREKIEKILTFRIPYYVGPLARGNSRFAWMTRKSEETITPWNFEEVVDKGASAQSFIERMTNFDKNLPNEKVLPKHSLLYEYFTVYNELTKVKYVTEGMRKPAFLSGEQKKAIVDLLFKTNRKVTVKQLKEDYFKKIECFDSVEISGVEDRFNASLGTYHDLLKIIKDKDFLDNEENEDILEDIVLTLTLFEDREMIEERLKTYAHLFDDKVMKQLKRRRYTGWGRLSRKLINGIRDKQSGKTILDFLKSDGFANRNFMQLIHDDSLTFKEDIQKAQVSGQGDSLHEHIANLAGSPAIKKGILQTVKVVDELVKVMGRHKPENIVIEMARENQTTQKGQKNSRERMKRIEEGIKELGSQILKEHPVENTQLQNEKLYLYYLQNGRDMYVDQELDINRLSDYDVDAIVPQSFLKDDSIDNKVLTRSDKNRGKSDNVPSEEVVKKMKNYWRQLLNAKLITQRKFDNLTKAERGGLSELDKAGFIKRQLVETRQITKHVAQILDSRMNTKYDENDKLIREVKVITLKSKLVSDFRKDFQFYKVREINNYHHAHDAYLNAVVGTALIKKYPKLESEFVYGDYKVYDVRKMIAKSEQEIGKATAKYFFYSNIMNFFKTEITLANGEIRKRPLIETNGETGEIVWDKGRDFATVRKVLSMPQVNIVKKTEVQTGGFSKESILPKRNSDKLIARKKDWDPKKYGGFDSPTVAYSVLVVAKVEKGKSKKLKSVKELLGITIMERSSFEKNPIDFLEAKGYKEVKKDLIIKLPKYSLFELENGRKRMLASAGELQKGNELALPSKYVNFLYLASHYEKLKGSPEDNEQKQLFVEQHKHYLDEIIEQISEFSKRVILADANLDKVLSAYNKHRDKPIREQAENIIHLFTLTNLGAPAAFKYFDTTIDRKRYTSTKEVLDATLIHQSITGLYETRIDLSQLGGDSGGSSGGSSGSETPGTSESATPESSGGSSGGSSEWIEYREQFITTAKKASKNSGYIKKNLKYAEKLYNQKLPIIYNASHFSKLVGYSLQYLYAASNDSSKFYREFEIKKKNGGSRKISEPLPSLKEIQKWILENILNKIQKEKVSKYAKAYQKKISIKENVKFHRGQKKVLSLDITNFFLNIKIDKIYEVFYNLGYSKSLSTLFSNLCTLNYSLPQGAPTSPILSNIVMLNFDNEIEKIVLEKRIRYTRYADDMTFSGDFLEKEIIKYVKENLNKIGLKINNKKTRVRKNWQQQMVTGIIVNEKIQISRKKRDELRQTMYYIEKYGIDSFLKYKGIKNKVYYLSHLKGILEYAYFINKNDKKLFNYIEYLKNNFFKEKSSISGGSKRTADGSEFEPKKKRKV

SEQ ID NO: 946 - protein, 1820 aa, synthetic construct
MKRTADGSEFESPKKKRKVDKKYSIGLDIGTNSVGWAVITDEYKVPSKKFKVLGNTDRHSIKKNLIGALLFDSGETAEATRLKRTARRRYTRRKNRICYLQEIFSNEMAKVDDSFFHRLEESFLVEEDKKHERHPIFGNIVDEVAYHEKYPTIYHLRKKLVDSTDKADLRLIYLALAHMIKFRGHFLIEGDLNPDNSDVDKLFIQLVQTYNQLFEENPINASGVDAKAILSARLSKSRRLENLIAQLPGEKKNGLFGNLIALSLGLTPNFKSNFDLAEDAKLQLSKDTYDDDLDNLLAQIGDQYADLFLAAKNLSDAILLSDILRVNTEITKAPLSASMIKRYDEHHQDLTLLKALVRQQLPEKYKEIFFDQSKNGYAGYIDGGASQEEFYKFIKPILEKMDGTEELLVKLNREDLLRKQRTFDNGSIPHQIHLGELHAILRRQEDFYPFLKDNREKIEKILTFRIPYYVGPLARGNSRFAWMTRKSEETITPWNFEEVVDKGASAQSFIERMTNFDKNLPNEKVLPKHSLLYEYFTVYNELTKVKYVTEGMRKPAFLSGEQKKAIVDLLFKTNRKVTVKQLKEDYFKKIECFDSVEISGVEDRFNASLGTYHDLLKIIKDKDFLDNEENEDILEDIVLTLTLFEDREMIEERLKTYAHLFDDKVMKQLKRRRYTGWGRLSRKLINGIRDKQSGKTILDFLKSDGFANRNFMQLIHDDSLTFKEDIQKAQVSGQGDSLHEHIANLAGSPAIKKGILQTVKVVDELVKVMGRHKPENIVIEMARENQTTQKGQKNSRERMKRIEEGIKELGSQILKEHPVENTQLQNEKLYLYYLQNGRDMYVDQELDINRLSDYDVDAIVPQSFLKDDSIDNKVLTRSDKNRGKSDNVPSEEVVKKMKNYWRQLLNAKLITQRKFDNLTKAERGGLSELDKAGFIKRQLVETRQITKHVAQILDSRMNTKYDENDKLIREVKVITLKSKLVSDFRKDFQFYKVREINNYHHAHDAYLNAVVGTALIKKYPKLESEFVYGDYKVYDVRKMIAKSEQEIGKATAKYFFYSNIMNFFKTEITLANGEIRKRPLIETNGETGEIVWDKGRDFATVRKVLSMPQVNIVKKTEVQTGGFSKESILPKRNSDKLIARKKDWDPKKYGGFDSPTVAYSVLVVAKVEKGKSKKLKSVKELLGITIMERSSFEKNPIDFLEAKGYKEVKKDLIIKLPKYSLFELENGRKRMLASAGELQKGNELALPSKYVNFLYLASHYEKLKGSPEDNEQKQLFVEQHKHYLDEIIEQISEFSKRVILADANLDKVLSAYNKHRDKPIREQAENIIHLFTLTNLGAPAAFKYFDTTIDRKRYTSTKEVLDATLIHQSITGLYETRIDLSQLGGDSGGSSGGSSGSETPGTSESATPESSGGSSGGSSNRWSSRAFKKHNSDKPAAVVETAALYGRKIQTSCPELPVIFTLNHLALKSGVPYNNLRSFVDRTIERPYRSFTLRKNGLGSNPRKFRVIKVPQQDLKKAQQFINQNILSKMEPHECSVAFSPGSKIYDAASEHCNARWLLKFDIVSFFESITEKSVYRVFRRYNYPALLSFEMARICTALKARPPINWGGAPPNIRYRTIPGYSNKNLGTLPQGAPTSPMLANLVSYNLDRRLKLIADAYNCHYSRYADDITFSTDSSLSRGEVSRIIAMINSTLREYGHTMNKAKTTIAPPGARKFYLGMNIHGDSPQLRKSFKRKLKQHLFFCEKNSVGPEKHSKHLGFVSVIGFKNHLRGLINYANQVDTVFGENCMKRFQSIDWPLSGGSKRTADGSEFEPKKKRKV

SEQ ID NO: 947 - protein, 1778 aa, synthetic construct
MKRTADGSEFESPKKKRKVDKKYSIGLDIGTNSVGWAVITDEYKVPSKKFKVLGNTDRHSIKKNLIGALLFDSGETAEATRLKRTARRRYTRRKNRICYLQEIFSNEMAKVDDSFFHRLEESFLVEEDKKHERHPIFGNIVDEVAYHEKYPTIYHLRKKLVDSTDKADLRLIYLALAHMIKFRGHFLIEGDLNPDNSDVDKLFIQLVQTYNQLFEENPINASGVDAKAILSARLSKSRRLENLIAQLPGEKKNGLFGNLIALSLGLTPNFKSNFDLAEDAKLQLSKDTYDDDLDNLLAQIGDQYADLFLAAKNLSDAILLSDILRVNTEITKAPLSASMIKRYDEHHQDLTLLKALVRQQLPEKYKEIFFDQSKNGYAGYIDGGASQEEFYKFIKPILEKMDGTEELLVKLNREDLLRKQRTFDNGSIPHQIHLGELHAILRRQEDFYPFLKDNREKIEKILTFRIPYYVGPLARGNSRFAWMTRKSEETITPWNFEEVVDKGASAQSFIERMTNFDKNLPNEKVLPKHSLLYEYFTVYNELTKVKYVTEGMRKPAFLSGEQKKAIVDLLFKTNRKVTVKQLKEDYFKKIECFDSVEISGVEDRFNASLGTYHDLLKIIKDKDFLDNEENEDILEDIVLTLTLFEDREMIEERLKTYAHLFDDKVMKQLKRRRYTGWGRLSRKLINGIRDKQSGKTILDFLKSDGFANRNFMQLIHDDSLTFKEDIQKAQVSGQGDSLHEHIANLAGSPAIKKGILQTVKVVDELVKVMGRHKPENIVIEMARENQTTQKGQKNSRERMKRIEEGIKELGSQILKEHPVENTQLQNEKLYLYYLQNGRDMYVDQELDINRLSDYDVDAIVPQSFLKDDSIDNKVLTRSDKNRGKSDNVPSEEVVKKMKNYWRQLLNAKLITQRKFDNLTKAERGGLSELDKAGFIKRQLVETRQITKHVAQILDSRMNTKYDENDKLIREVKVITLKSKLVSDFRKDFQFYKVREINNYHHAHDAYLNAVVGTALIKKYPKLESEFVYGDYKVYDVRKMIAKSEQEIGKATAKYFFYSNIMNFFKTEITLANGEIRKRPLIETNGETGEIVWDKGRDFATVRKVLSMPQVNIVKKTEVQTGGFSKESILPKRNSDKLIARKKDWDPKKYGGFDSPTVAYSVLVVAKVEKGKSKKLKSVKELLGITIMERSSFEKNPIDFLEAKGYKEVKKDLIIKLPKYSLFELENGRKRMLASAGELQKGNELALPSKYVNFLYLASHYEKLKGSPEDNEQKQLFVEQHKHYLDEIIEQISEFSKRVILADANLDKVLSAYNKHRDKPIREQAENIIHLFTLTNLGAPAAFKYFDTTIDRKRYTSTKEVLDATLIHQSITGLYETRIDLSQLGGDSGGSSGGSSGSETPGTSESATPESSGGSSGGSSFTQEHLHFAWLQVCAGSKTAGVDGISVELFESMATEQLQNLVYQLNNETYTASPAKGFYIPKKNGDKRLVGIPTVRDRIIQRLLLDELYFPLEGTFLDCSYAYRPGHNILQAVQHLYGYYQYQPKWIIKADVADFFDNLSWALLLTFLEKLSLEPSVLQLIEQQLQSGMIIAGQYRNFGKGVLQGGILSGALANLYLTNFDKKCLSQGINLVRYGDDFVIACNSWQEANRILDKITVWLGEVYLTLQSEKTQIFTPNDEFTFLGYRFAGGEVYAPPPPKPVLKGEWVINDSGNPYFRTKPRPKKPVSHPPKACSIDKPINFPRASLSHYWQETMTTKLSGGSKRTADGSEFEPKKKRKV

SEQ ID NO: 948 - protein, 1795 aa, synthetic construct
MKRTADGSEFESPKKKRKVDKKYSIGLDIGTNSVGWAVITDEYKVPSKKFKVLGNTDRHSIKKNLIGALLFDSGETAEATRLKRTARRRYTRRKNRICYLQEIFSNEMAKVDDSFFHRLEESFLVEEDKKHERHPIFGNIVDEVAYHEKYPTIYHLRKKLVDSTDKADLRLIYLALAHMIKFRGHFLIEGDLNPDNSDVDKLFIQLVQTYNQLFEENPINASGVDAKAILSARLSKSRRLENLIAQLPGEKKNGLFGNLIALSLGLTPNFKSNFDLAEDAKLQLSKDTYDDDLDNLLAQIGDQYADLFLAAKNLSDAILLSDILRVNTEITKAPLSASMIKRYDEHHQDLTLLKALVRQQLPEKYKEIFFDQSKNGYAGYIDGGASQEEFYKFIKPILEKMDGTEELLVKLNREDLLRKQRTFDNGSIPHQIHLGELHAILRRQEDFYPFLKDNREKIEKILTFRIPYYVGPLARGNSRFAWMTRKSEETITPWNFEEVVDKGASAQSFIERMTNFDKNLPNEKVLPKHSLLYEYFTVYNELTKVKYVTEGMRKPAFLSGEQKKAIVDLLFKTNRKVTVKQLKEDYFKKIECFDSVEISGVEDRFNASLGTYHDLLKIIKDKDFLDNEENEDILEDIVLTLTLFEDREMIEERLKTYAHLFDDKVMKQLKRRRYTGWGRLSRKLINGIRDKQSGKTILDFLKSDGFANRNFMQLIHDDSLTFKEDIQKAQVSGQGDSLHEHIANLAGSPAIKKGILQTVKVVDELVKVMGRHKPENIVIEMARENQTTQKGQKNSRERMKRIEEGIKELGSQILKEHPVENTQLQNEKLYLYYLQNGRDMYVDQELDINRLSDYDVDAIVPQSFLKDDSIDNKVLTRSDKNRGKSDNVPSEEVVKKMKNYWRQLLNAKLITQRKFDNLTKAERGGLSELDKAGFIKRQLVETRQITKHVAQILDSRMNTKYDENDKLIREVKVITLKSKLVSDFRKDFQFYKVREINNYHHAHDAYLNAVVGTALIKKYPKLESEFVYGDYKVYDVRKMIAKSEQEIGKATAKYFFYSNIMNFFKTEITLANGEIRKRPLIETNGETGEIVWDKGRDFATVRKVLSMPQVNIVKKTEVQTGGFSKESILPKRNSDKLIARKKDWDPKKYGGFDSPTVAYSVLVVAKVEKGKSKKLKSVKELLGITIMERSSFEKNPIDFLEAKGYKEVKKDLIIKLPKYSLFELENGRKRMLASAGELQKGNELALPSKYVNFLYLASHYEKLKGSPEDNEQKQLFVEQHKHYLDEIIEQISEFSKRVILADANLDKVLSAYNKHRDKPIREQAENIIHLFTLTNLGAPAAFKYFDTTIDRKRYTSTKEVLDATLIHQSITGLYETRIDLSQLGGDSGGSSGGSSGSETPGTSESATPESSGGSSGGSSQYQLQDAYGYCSYPRPQAAKSLLEKSLSDASLHQACQTMYPRQANFDSSDTDEEHHDAIDELLTKLYVSRERIFKREFTPSQLHSVEIEKPEGGTRLLSVPNWHDRTLQKAVTECLGNTLEHIWMKHSYGYRKGHSRLQARDQINQYIQQGYEWVLESDIESFFDSVNWLNLEQRLKLLLPNEPLVPLLMQWVSAAKQTEDEQTLARHNGLPQGAPISPILANLLLDDLDQDMIAKGHQIVRYADDFVLLFKSKAAAESALDDIITALKEHHLAINLEKTRIVEASQGFRYLGYLFVDGYAIETKREYRKEHAQLDKQLNASSLENEPSLQQEPAVQNEQSTLIGEREKLGTLKLSGGSKRTADGSEFEPKKKRKV

SEQ ID NO: 949 - protein, 1832 aa, synthetic construct
MKRTADGSEFESPKKKRKVDKKYSIGLDIGTNSVGWAVITDEYKVPSKKFKVLGNTDRHSIKKNLIGALLFDSGETAEATRLKRTARRRYTRRKNRICYLQEIFSNEMAKVDDSFFHRLEESFLVEEDKKHERHPIFGNIVDEVAYHEKYPTIYHLRKKLVDSTDKADLRLIYLALAHMIKFRGHFLIEGDLNPDNSDVDKLFIQLVQTYNQLFEENPINASGVDAKAILSARLSKSRRLENLIAQLPGEKKNGLFGNLIALSLGLTPNFKSNFDLAEDAKLQLSKDTYDDDLDNLLAQIGDQYADLFLAAKNLSDAILLSDILRVNTEITKAPLSASMIKRYDEHHQDLTLLKALVRQQLPEKYKEIFFDQSKNGYAGYIDGGASQEEFYKFIKPILEKMDGTEELLVKLNREDLLRKQRTFDNGSIPHQIHLGELHAILRRQEDFYPFLKDNREKIEKILTFRIPYYVGPLARGNSRFAWMTRKSEETITPWNFEEVVDKGASAQSFIERMTNFDKNLPNEKVLPKHSLLYEYFTVYNELTKVKYVTEGMRKPAFLSGEQKKAIVDLLFKTNRKVTVKQLKEDYFKKIECFDSVEISGVEDRFNASLGTYHDLLKIIKDKDFLDNEENEDILEDIVLTLTLFEDREMIEERLKTYAHLFDDKVMKQLKRRRYTGWGRLSRKLINGIRDKQSGKTILDFLKSDGFANRNFMQLIHDDSLTFKEDIQKAQVSGQGDSLHEHIANLAGSPAIKKGILQTVKVVDELVKVMGRHKPENIVIEMARENQTTQKGQKNSRERMKRIEEGIKELGSQILKEHPVENTQLQNEKLYLYYLQNGRDMYVDQELDINRLSDYDVDAIVPQSFLKDDSIDNKVLTRSDKNRGKSDNVPSEEVVKKMKNYWRQLLNAKLITQRKFDNLTKAERGGLSELDKAGFIKRQLVETRQITKHVAQILDSRMNTKYDENDKLIREVKVITLKSKLVSDFRKDFQFYKVREINNYHHAHDAYLNAVVGTALIKKYPKLESEFVYGDYKVYDVRKMIAKSEQEIGKATAKYFFYSNIMNFFKTEITLANGEIRKRPLIETNGETGEIVWDKGRDFATVRKVLSMPQVNIVKKTEVQTGGFSKESILPKRNSDKLIARKKDWDPKKYGGFDSPTVAYSVLVVAKVEKGKSKKLKSVKELLGITIMERSSFEKNPIDFLEAKGYKEVKKDLIIKLPKYSLFELENGRKRMLASAGELQKGNELALPSKYVNFLYLASHYEKLKGSPEDNEQKQLFVEQHKHYLDEIIEQISEFSKRVILADANLDKVLSAYNKHRDKPIREQAENIIHLFTLTNLGAPAAFKYFDTTIDRKRYTSTKEVLDATLIHQSITGLYETRIDLSQLGGDSGGSSGGSSGSETPGTSESATPESSGGSSGGSSGWLYNQMAMPETIFQAWYKVASNDGRPGWDNKSIEDYSLQLEENLKALSQALLTGTYKQGPLMKLVLLKPDGKDRVLLIPGVMDRVAQTAAAIVLSPIIEAELGNCTFAYRPGISREGAAREIDRLHREGYQWVLDADIRSFFDNVRHDLLFQRLVELIDDKEMISLLHRWLTAEIVDGINPRIQNTMGLPQGCPISPALANLYLDRFDETMEKEGFKLVRFADDYLVLCKTRPKAEAALKLSETALAELKLELHSDKTRITTFAEGFKYLGYLFIRALVIPTKMHPEEWYDKLGKFKLRKKSEHALPSDPDAMTGETAKFELETDQGEKIELTKNELLQTEFGCKLLESLDKKQLSVDEFLEKVARQDEERQKEKRDALKKLYSPFLNTKLSGGSKRTADGSEFEPKKKRKV

SEQ ID NO: 950 - protein, 1866 aa, synthetic construct
MKRTADGSEFESPKKKRKVDKKYSIGLDIGTNSVGWAVITDEYKVPSKKFKVLGNTDRHSIKKNLIGALLFDSGETAEATRLKRTARRRYTRRKNRICYLQEIFSNEMAKVDDSFFHRLEESFLVEEDKKHERHPIFGNIVDEVAYHEKYPTIYHLRKKLVDSTDKADLRLIYLALAHMIKFRGHFLIEGDLNPDNSDVDKLFIQLVQTYNQLFEENPINASGVDAKAILSARLSKSRRLENLIAQLPGEKKNGLFGNLIALSLGLTPNFKSNFDLAEDAKLQLSKDTYDDDLDNLLAQIGDQYADLFLAAKNLSDAILLSDILRVNTEITKAPLSASMIKRYDEHHQDLTLLKALVRQQLPEKYKEIFFDQSKNGYAGYIDGGASQEEFYKFIKPILEKMDGTEELLVKLNREDLLRKQRTFDNGSIPHQIHLGELHAILRRQEDFYPFLKDNREKIEKILTFRIPYYVGPLARGNSRFAWMTRKSEETITPWNFEEVVDKGASAQSFIERMTNFDKNLPNEKVLPKHSLLYEYFTVYNELTKVKYVTEGMRKPAFLSGEQKKAIVDLLFKTNRKVTVKQLKEDYFKKIECFDSVEISGVEDRFNASLGTYHDLLKIIKDKDFLDNEENEDILEDIVLTLTLFEDREMIEERLKTYAHLFDDKVMKQLKRRRYTGWGRLSRKLINGIRDKQSGKTILDFLKSDGFANRNFMQLIHDDSLTFKEDIQKAQVSGQGDSLHEHIANLAGSPAIKKGILQTVKVVDELVKVMGRHKPENIVIEMARENQTTQKGQKNSRERMKRIEEGIKELGSQILKEHPVENTQLQNEKLYLYYLQNGRDMYVDQELDINRLSDYDVDAIVPQSFLKDDSIDNKVLTRSDKNRGKSDNVPSEEVVKKMKNYWRQLLNAKLITQRKFDNLTKAERGGLSELDKAGFIKRQLVETRQITKHVAQILDSRMNTKYDENDKLIREVKVITLKSKLVSDFRKDFQFYKVREINNYHHAHDAYLNAVVGTALIKKYPKLESEFVYGDYKVYDVRKMIAKSEQEIGKATAKYFFYSNIMNFFKTEITLANGEIRKRPLIETNGETGEIVWDKGRDFATVRKVLSMPQVNIVKKTEVQTGGFSKESILPKRNSDKLIARKKDWDPKKYGGFDSPTVAYSVLVVAKVEKGKSKKLKSVKELLGITIMERSSFEKNPIDFLEAKGYKEVKKDLIIKLPKYSLFELENGRKRMLASAGELQKGNELALPSKYVNFLYLASHYEKLKGSPEDNEQKQLFVEQHKHYLDEIIEQISEFSKRVILADANLDKVLSAYNKHRDKPIREQAENIIHLFTLTNLGAPAAFKYFDTTIDRKRYTSTKEVLDATLIHQSITGLYETRIDLSQLGGDSGGSSGGSSGSETPGTSESATPESSGGSSGGSSDTSNLMEQILSSDNLNRAYLQVVRNKGAEGVDGMKYTELKEHLAKNGETIKGQLRTRKYKPQPARRVEIPKPDGGVRNLGVPTVTDRFIQQAIAQVLTPIYEEQFHDHSYGFRPNRCAQQAILTALNIMNDGNDWIVDIDLEKFFDTVNHDKLMTLIGRTIKDGDVISIVRKYLVSGIMIDDEYEDSIVGTPQGGNLSPLLANIMLNELDKEMEKRGLNFVRYADDCIIMVGSEMSANRVMRNISRFIEEKLGLKVNMTKSKVDRPSGLKYLGFGFYFDPRAHQFKAKPHAKSVAKFKKRMKELTCRSWGVSNSYKVEKLNQLIRGWINYFKIGSMKTLCKELDSRIRYRLRMCIWKQWKTPQNQEKNLVKLGIDRNTARRVAYTGKRIAYVCNKGAVNVAISNKRLASFGLISMLDYYIEKCVTCSGGSKRTADGSEFEPKKKRKV

SEQ ID NO: 951 - protein, 1909 aa, synthetic construct
MKRTADGSEFESPKKKRKVDKKYSIGLDIGTNSVGWAVITDEYKVPSKKFKVLGNTDRHSIKKNLIGALLFDSGETAEATRLKRTARRRYTRRKNRICYLQEIFSNEMAKVDDSFFHRLEESFLVEEDKKHERHPIFGNIVDEVAYHEKYPTIYHLRKKLVDSTDKADLRLIYLALAHMIKFRGHFLIEGDLNPDNSDVDKLFIQLVQTYNQLFEENPINASGVDAKAILSARLSKSRRLENLIAQLPGEKKNGLFGNLIALSLGLTPNFKSNFDLAEDAKLQLSKDTYDDDLDNLLAQIGDQYADLFLAAKNLSDAILLSDILRVNTEITKAPLSASMIKRYDEHHQDLTLLKALVRQQLPEKYKEIFFDQSKNGYAGYIDGGASQEEFYKFIKPILEKMDGTEELLVKLNREDLLRKQRTFDNGSIPHQIHLGELHAILRRQEDFYPFLKDNREKIEKILTFRIPYYVGPLARGNSRFAWMTRKSEETITPWNFEEVVDKGASAQSFIERMTNFDKNLPNEKVLPKHSLLYEYFTVYNELTKVKYVTEGMRKPAFLSGEQKKAIVDLLFKTNRKVTVKQLKEDYFKKIECFDSVEISGVEDRFNASLGTYHDLLKIIKDKDFLDNEENEDILEDIVLTLTLFEDREMIEERLKTYAHLFDDKVMKQLKRRRYTGWGRLSRKLINGIRDKQSGKTILDFLKSDGFANRNFMQLIHDDSLTFKEDIQKAQVSGQGDSLHEHIANLAGSPAIKKGILQTVKVVDELVKVMGRHKPENIVIEMARENQTTQKGQKNSRERMKRIEEGIKELGSQILKEHPVENTQLQNEKLYLYYLQNGRDMYVDQELDINRLSDYDVDAIVPQSFLKDDSIDNKVLTRSDKNRGKSDNVPSEEVVKKMKNYWRQLLNAKLITQRKFDNLTKAERGGLSELDKAGFIKRQLVETRQITKHVAQILDSRMNTKYDENDKLIREVKVITLKSKLVSDFRKDFQFYKVREINNYHHAHDAYLNAVVGTALIKKYPKLESEFVYGDYKVYDVRKMIAKSEQEIGKATAKYFFYSNIMNFFKTEITLANGEIRKRPLIETNGETGEIVWDKGRDFATVRKVLSMPQVNIVKKTEVQTGGFSKESILPKRNSDKLIARKKDWDPKKYGGFDSPTVAYSVLVVAKVEKGKSKKLKSVKELLGITIMERSSFEKNPIDFLEAKGYKEVKKDLIIKLPKYSLFELENGRKRMLASAGELQKGNELALPSKYVNFLYLASHYEKLKGSPEDNEQKQLFVEQHKHYLDEIIEQISEFSKRVILADANLDKVLSAYNKHRDKPIREQAENIIHLFTLTNLGAPAAFKYFDTTIDRKRYTSTKEVLDATLIHQSITGLYETRIDLSQLGGDSGGSSGGSSGSETPGTSESATPESSGGSSGGSSDSKDMQRLQTTQQRGYPLDREMEFQKTTEVHSISSASRDGRNEVQRYTSKMLEMIVERGNMRAAYKRVVANKGSHGVDGMEVDELLPYLKENWPTIKQQLLEGKYKPQPVRRVEIPKPDGGVRLLGIPTALDRLIQQAIAQILNRVYNHTFSDSSYGFRPGRSAKDAIKAAEAYINEGYTWVVDMDLEKFFDRVNHDIIMSKLEKRIGDKRVLKLIRRYLESGVMINGVKVSTEEGTPQGGPLSPLLANIMLDELDKELEKRGHKFCRYADDCNIYVKSRSAGNRVMKSIKKFIESKLKLKVNEAKSAVDRPWRRKFLGFSFYTKENEVRIRIHEKSIKRFKEKVREITNRNKGISMENRIKRLNQITTGWVNYFGLADAKSIMKTLDEWIRRRLRACIWKQWKKIKTKHDNLVKLGVEEQKAWEYANTRKGYWRISNSPILNKTLTNKYFESIGYKSLSQRYLIVHNSSGGSKRTADGSEFEPKKKRKV

SEQ ID NO: 952 - protein, 1707 aa, synthetic construct
MKRTADGSEFESPKKKRKVDKKYSIGLDIGTNSVGWAVITDEYKVPSKKFKVLGNTDRHSIKKNLIGALLFDSGETAEATRLKRTARRRYTRRKNRICYLQEIFSNEMAKVDDSFFHRLEESFLVEEDKKHERHPIFGNIVDEVAYHEKYPTIYHLRKKLVDSTDKADLRLIYLALAHMIKFRGHFLIEGDLNPDNSDVDKLFIQLVQTYNQLFEENPINASGVDAKAILSARLSKSRRLENLIAQLPGEKKNGLFGNLIALSLGLTPNFKSNFDLAEDAKLQLSKDTYDDDLDNLLAQIGDQYADLFLAAKNLSDAILLSDILRVNTEITKAPLSASMIKRYDEHHQDLTLLKALVRQQLPEKYKEIFFDQSKNGYAGYIDGGASQEEFYKFIKPILEKMDGTEELLVKLNREDLLRKQRTFDNGSIPHQIHLGELHAILRRQEDFYPFLKDNREKIEKILTFRIPYYVGPLARGNSRFAWMTRKSEETITPWNFEEVVDKGASAQSFIERMTNFDKNLPNEKVLPKHSLLYEYFTVYNELTKVKYVTEGMRKPAFLSGEQKKAIVDLLFKTNRKVTVKQLKEDYFKKIECFDSVEISGVEDRFNASLGTYHDLLKIIKDKDFLDNEENEDILEDIVLTLTLFEDREMIEERLKTYAHLFDDKVMKQLKRRRYTGWGRLSRKLINGIRDKQSGKTILDFLKSDGFANRNFMQLIHDDSLTFKEDIQKAQVSGQGDSLHEHIANLAGSPAIKKGILQTVKVVDELVKVMGRHKPENIVIEMARENQTTQKGQKNSRERMKRIEEGIKELGSQILKEHPVENTQLQNEKLYLYYLQNGRDMYVDQELDINRLSDYDVDAIVPQSFLKDDSIDNKVLTRSDKNRGKSDNVPSEEVVKKMKNYWRQLLNAKLITQRKFDNLTKAERGGLSELDKAGFIKRQLVETRQITKHVAQILDSRMNTKYDENDKLIREVKVITLKSKLVSDFRKDFQFYKVREINNYHHAHDAYLNAVVGTALIKKYPKLESEFVYGDYKVYDVRKMIAKSEQEIGKATAKYFFYSNIMNFFKTEITLANGEIRKRPLIETNGETGEIVWDKGRDFATVRKVLSMPQVNIVKKTEVQTGGFSKESILPKRNSDKLIARKKDWDPKKYGGFDSPTVAYSVLVVAKVEKGKSKKLKSVKELLGITIMERSSFEKNPIDFLEAKGYKEVKKDLIIKLPKYSLFELENGRKRMLASAGELQKGNELALPSKYVNFLYLASHYEKLKGSPEDNEQKQLFVEQHKHYLDEIIEQISEFSKRVILADANLDKVLSAYNKHRDKPIREQAENIIHLFTLTNLGAPAAFKYFDTTIDRKRYTSTKEVLDATLIHQSITGLYETRIDLSQLGGDSGGSSGGSSGSETPGTSESATPESSGGSSGGSSRAAGIDGITVDLFTGIAREQIHQLYRQMRQERYVARPAKGFYLAKQKGGHRLIGIPTVRDRIVQRYLLQSIYPSLENAFSDAVFAYRPGLSIYAAVKRVMERYRYQPTWVIKADIQQFFDQLSWPLLLHQLDQLSLPATWVQWIEQQLKAGIVVSGQFYQPGQGVLPGSILSGALANLYLNDFDRHCLEADIPLVRYGDDCVAVCQSYLEASRSLALMQDWIEGLSLSFHPEKTTIIPPGQAFVFLGHRFRNGTVEGPARQKAEGRRSGGSKRTADGSEFEPKKKRKV

SEQ ID NO: 953 - protein, 1779 aa, synthetic construct
MKRTADGSEFESPKKKRKVDKKYSIGLDIGTNSVGWAVITDEYKVPSKKFKVLGNTDRHSIKKNLIGALLFDSGETAEATRLKRTARRRYTRRKNRICYLQEIFSNEMAKVDDSFFHRLEESFLVEEDKKHERHPIFGNIVDEVAYHEKYPTIYHLRKKLVDSTDKADLRLIYLALAHMIKFRGHFLIEGDLNPDNSDVDKLFIQLVQTYNQLFEENPINASGVDAKAILSARLSKSRRLENLIAQLPGEKKNGLFGNLIALSLGLTPNFKSNFDLAEDAKLQLSKDTYDDDLDNLLAQIGDQYADLFLAAKNLSDAILLSDILRVNTEITKAPLSASMIKRYDEHHQDLTLLKALVRQQLPEKYKEIFFDQSKNGYAGYIDGGASQEEFYKFIKPILEKMDGTEELLVKLNREDLLRKQRTFDNGSIPHQIHLGELHAILRRQEDFYPFLKDNREKIEKILTFRIPYYVGPLARGNSRFAWMTRKSEETITPWNFEEVVDKGASAQSFIERMTNFDKNLPNEKVLPKHSLLYEYFTVYNELTKVKYVTEGMRKPAFLSGEQKKAIVDLLFKTNRKVTVKQLKEDYFKKIECFDSVEISGVEDRFNASLGTYHDLLKIIKDKDFLDNEENEDILEDIVLTLTLFEDREMIEERLKTYAHLFDDKVMKQLKRRRYTGWGRLSRKLINGIRDKQSGKTILDFLKSDGFANRNFMQLIHDDSLTFKEDIQKAQVSGQGDSLHEHIANLAGSPAIKKGILQTVKVVDELVKVMGRHKPENIVIEMARENQTTQKGQKNSRERMKRIEEGIKELGSQILKEHPVENTQLQNEKLYLYYLQNGRDMYVDQELDINRLSDYDVDAIVPQSFLKDDSIDNKVLTRSDKNRGKSDNVPSEEVVKKMKNYWRQLLNAKLITQRKFDNLTKAERGGLSELDKAGFIKRQLVETRQITKHVAQILDSRMNTKYDENDKLIREVKVITLKSKLVSDFRKDFQFYKVREINNYHHAHDAYLNAVVGTALIKKYPKLESEFVYGDYKVYDVRKMIAKSEQEIGKATAKYFFYSNIMNFFKTEITLANGEIRKRPLIETNGETGEIVWDKGRDFATVRKVLSMPQVNIVKKTEVQTGGFSKESILPKRNSDKLIARKKDWDPKKYGGFDSPTVAYSVLVVAKVEKGKSKKLKSVKELLGITIMERSSFEKNPIDFLEAKGYKEVKKDLIIKLPKYSLFELENGRKRMLASAGELQKGNELALPSKYVNFLYLASHYEKLKGSPEDNEQKQLFVEQHKHYLDEIIEQISEFSKRVILADANLDKVLSAYNKHRDKPIREQAENIIHLFTLTNLGAPAAFKYFDTTIDRKRYTSTKEVLDATLIHQSITGLYETRIDLSQLGGDSGGSSGGSSGSETPGTSESATPESSGGSSGGSSWFADEPRHTRGGSRMADLYRQVRLMKTLSSAWRVVRASCMQSSSSEIRNEAIEFEADSFRQLKSIQSKLQKKKFEFLPQHGIAKKRPGKSSRPLVIAPIPNRIVQRAILDVLQDNVAYVQEILKVETSFGGIKGKNVALAIAAINKAFSNGVTHYVRSDIPSFFTKVQRAKVVDALAKNIDDVDMVNLFSAAIETTLGNLTDLQRRGLESIFPLSHDGVAQGSPLSPLIANIYLAEFDREMNREGLACIRYIDDFVIMAASEKQVMKGFRAAKAVLRRQGLQVYSPDDDPLKASKGDVRDGFDFLGCYVKPGLVQPSKFARNRLLEKIDSGGSKRTADGSGGSKRTADGSEFEPKKKRKV

SEQ ID NO: 954 - protein, 1867 aa, synthetic construct
MKRTADGSEFESPKKKRKVDKKYSIGLDIGTNSVGWAVITDEYKVPSKKFKVLGNTDRHSIKKNLIGALLFDSGETAEATRLKRTARRRYTRRKNRICYLQEIFSNEMAKVDDSFFHRLEESFLVEEDKKHERHPIFGNIVDEVAYHEKYPTIYHLRKKLVDSTDKADLRLIYLALAHMIKFRGHFLIEGDLNPDNSDVDKLFIQLVQTYNQLFEENPINASGVDAKAILSARLSKSRRLENLIAQLPGEKKNGLFGNLIALSLGLTPNFKSNFDLAEDAKLQLSKDTYDDDLDNLLAQIGDQYADLFLAAKNLSDAILLSDILRVNTEITKAPLSASMIKRYDEHHQDLTLLKALVRQQLPEKYKEIFFDQSKNGYAGYIDGGASQEEFYKFIKPILEKMDGTEELLVKLNREDLLRKQRTFDNGSIPHQIHLGELHAILRRQEDFYPFLKDNREKIEKILTFRIPYYVGPLARGNSRFAWMTRKSEETITPWNFEEVVDKGASAQSFIERMTNFDKNLPNEKVLPKHSLLYEYFTVYNELTKVKYVTEGMRKPAFLSGEQKKAIVDLLFKTNRKVTVKQLKEDYFKKIECFDSVEISGVEDRFNASLGTYHDLLKIIKDKDFLDNEENEDILEDIVLTLTLFEDREMIEERLKTYAHLFDDKVMKQLKRRRYTGWGRLSRKLINGIRDKQSGKTILDFLKSDGFANRNFMQLIHDDSLTFKEDIQKAQVSGQGDSLHEHIANLAGSPAIKKGILQTVKVVDELVKVMGRHKPENIVIEMARENQTTQKGQKNSRERMKRIEEGIKELGSQILKEHPVENTQLQNEKLYLYYLQNGRDMYVDQELDINRLSDYDVDAIVPQSFLKDDSIDNKVLTRSDKNRGKSDNVPSEEVVKKMKNYWRQLLNAKLITQRKFDNLTKAERGGLSELDKAGFIKRQLVETRQITKHVAQILDSRMNTKYDENDKLIREVKVITLKSKLVSDFRKDFQFYKVREINNYHHAHDAYLNAVVGTALIKKYPKLESEFVYGDYKVYDVRKMIAKSEQEIGKATAKYFFYSNIMNFFKTEITLANGEIRKRPLIETNGETGEIVWDKGRDFATVRKVLSMPQVNIVKKTEVQTGGFSKESILPKRNSDKLIARKKDWDPKKYGGFDSPTVAYSVLVVAKVEKGKSKKLKSVKELLGITIMERSSFEKNPIDFLEAKGYKEVKKDLIIKLPKYSLFELENGRKRMLASAGELQKGNELALPSKYVNFLYLASHYEKLKGSPEDNEQKQLFVEQHKHYLDEIIEQISEFSKRVILADANLDKVLSAYNKHRDKPIREQAENIIHLFTLTNLGAPAAFKYFDTTIDRKRYTSTKEVLDATLIHQSITGLYETRIDLSQLGGDSGGSSGGSSGSETPGTSESATPESSGGSSGGSSQPLLQFPEGKVRNFQRKLYVKAKQEKTFRFYSLYDKLYREDVLQYAWQQCRANKGAPGADGQSFKDIEEKVGVERFLKEIAEELRNGTYRPMPVRRVYILKPDGSQRPLGIPTIKDRIAQMACLTVIQPIFEADFLDCSYGFRPKRNAHQAIGAITENIKQGFTAVYDADLTKCFDSIQHRLIMDSLAERITDGKVLRLIKGWLEAPIVEPGGPKQGRKNYQGTPQGGVISPLLANIVLNRLDRLWHRPGGPRERYNARLVRYADDFVVLARFIGEPIKNELESIITSMGLNLNEKKTRILDLNKGDILNFLGYSIRISRDKNRRITIKPSDKAIARLRDKIREIISRERLYHGLKGIIAEINPVLRGWKQYFKLTNVSRIFSGLNFYITARFYRVGRKTSQRYSKIFKPGVYVTLRKMGLYCLATDSGGSKRTADGSEFEPKKKRKV

SEQ ID NO: 955 - protein, 1859 aa, synthetic construct
MKRTADGSEFESPKKKRKVDKKYSIGLDIGTNSVGWAVITDEYKVPSKKFKVLGNTDRHSIKKNLIGALLFDSGETAEATRLKRTARRRYTRRKNRICYLQEIFSNEMAKVDDSFFHRLEESFLVEEDKKHERHPIFGNIVDEVAYHEKYPTIYHLRKKLVDSTDKADLRLIYLALAHMIKFRGHFLIEGDLNPDNSDVDKLFIQLVQTYNQLFEENPINASGVDAKAILSARLSKSRRLENLIAQLPGEKKNGLFGNLIALSLGLTPNFKSNFDLAEDAKLQLSKDTYDDDLDNLLAQIGDQYADLFLAAKNLSDAILLSDILRVNTEITKAPLSASMIKRYDEHHQDLTLLKALVRQQLPEKYKEIFFDQSKNGYAGYIDGGASQEEFYKFIKPILEKMDGTEELLVKLNREDLLRKQRTFDNGSIPHQIHLGELHAILRRQEDFYPFLKDNREKIEKILTFRIPYYVGPLARGNSRFAWMTRKSEETITPWNFEEVVDKGASAQSFIERMTNFDKNLPNEKVLPKHSLLYEYFTVYNELTKVKYVTEGMRKPAFLSGEQKKAIVDLLFKTNRKVTVKQLKEDYFKKIECFDSVEISGVEDRFNASLGTYHDLLKIIKDKDFLDNEENEDILEDIVLTLTLFEDREMIEERLKTYAHLFDDKVMKQLKRRRYTGWGRLSRKLINGIRDKQSGKTILDFLKSDGFANRNFMQLIHDDSLTFKEDIQKAQVSGQGDSLHEHIANLAGSPAIKKGILQTVKVVDELVKVMGRHKPENIVIEMARENQTTQKGQKNSRERMKRIEEGIKELGSQILKEHPVENTQLQNEKLYLYYLQNGRDMYVDQELDINRLSDYDVDAIVPQSFLKDDSIDNKVLTRSDKNRGKSDNVPSEEVVKKMKNYWRQLLNAKLITQRKFDNLTKAERGGLSELDKAGFIKRQLVETRQITKHVAQILDSRMNTKYDENDKLIREVKVITLKSKLVSDFRKDFQFYKVREINNYHHAHDAYLNAVVGTALIKKYPKLESEFVYGDYKVYDVRKMIAKSEQEIGKATAKYFFYSNIMNFFKTEITLANGEIRKRPLIETNGETGEIVWDKGRDFATVRKVLSMPQVNIVKKTEVQTGGFSKESILPKRNSDKLIARKKDWDPKKYGGFDSPTVAYSVLVVAKVEKGKSKKLKSVKELLGITIMERSSFEKNPIDFLEAKGYKEVKKDLIIKLPKYSLFELENGRKRMLASAGELQKGNELALPSKYVNFLYLASHYEKLKGSPEDNEQKQLFVEQHKHYLDEIIEQISEFSKRVILADANLDKVLSAYNKHRDKPIREQAENIIHLFTLTNLGAPAAFKYFDTTIDRKRYTSTKEVLDATLIHQSITGLYETRIDLSQLGGDSGGSSGGSSGSETPGTSESATPESSGGSSGGSSQETKPFGISKNVVMMAFERVKANKGTYGMDEQSIEMYEMDLKNNLYKLWNRMSSGSYFPKPVKAVAIPKKNGGTRTLGIPTVEDRVAQMVAKLYFEPNVERLFYEDSYGYRPNKSAIQAIEATRKRCWRKDWVLEFDIKGLFDNIRHDYLIEMVKRHTNQEWVTLYVQRWLITPFQMEDGTLIERTAGTPQGGVISPVLANLFLHYTFDDFMVKEFSSIPWARYADDGIAHCTSLKQAKYLQRRLEERFKLFGLELNLEKTKIAYCKDDDRQLSYPNTSFDFLGYTFRPRHAKNKHGKFFTNFSPAIADKAKKAIRKEVRSWRLQLKADKTLQDISNMFNKKIQGWINYYGHFYKSEMYSVLRYINSSLIKWVRRKYKKRKHRRKAEYWLGTIAQRERKLFAHWKYGILPATNNGSRMSSGGSKRTADGSEFEPKKKRKV

SEQ ID NO: 956 - protein, 1859 aa, synthetic construct
MKRTADGSEFESPKKKRKVDKKYSIGLDIGTNSVGWAVITDEYKVPSKKFKVLGNTDRHSIKKNLIGALLFDSGETAEATRLKRTARRRYTRRKNRICYLQEIFSNEMAKVDDSFFHRLEESFLVEEDKKHERHPIFGNIVDEVAYHEKYPTIYHLRKKLVDSTDKADLRLIYLALAHMIKFRGHFLIEGDLNPDNSDVDKLFIQLVQTYNQLFEENPINASGVDAKAILSARLSKSRRLENLIAQLPGEKKNGLFGNLIALSLGLTPNFKSNFDLAEDAKLQLSKDTYDDDLDNLLAQIGDQYADLFLAAKNLSDAILLSDILRVNTEITKAPLSASMIKRYDEHHQDLTLLKALVRQQLPEKYKEIFFDQSKNGYAGYIDGGASQEEFYKFIKPILEKMDGTEELLVKLNREDLLRKQRTFDNGSIPHQIHLGELHAILRRQEDFYPFLKDNREKIEKILTFRIPYYVGPLARGNSRFAWMTRKSEETITPWNFEEVVDKGASAQSFIERMTNFDKNLPNEKVLPKHSLLYEYFTVYNELTKVKYVTEGMRKPAFLSGEQKKAIVDLLFKTNRKVTVKQLKEDYFKKIECFDSVEISGVEDRFNASLGTYHDLLKIIKDKDFLDNEENEDILEDIVLTLTLFEDREMIEERLKTYAHLFDDKVMKQLKRRRYTGWGRLSRKLINGIRDKQSGKTILDFLKSDGFANRNFMQLIHDDSLTFKEDIQKAQVSGQGDSLHEHIANLAGSPAIKKGILQTVKVVDELVKVMGRHKPENIVIEMARENQTTQKGQKNSRERMKRIEEGIKELGSQILKEHPVENTQLQNEKLYLYYLQNGRDMYVDQELDINRLSDYDVDAIVPQSFLKDDSIDNKVLTRSDKNRGKSDNVPSEEVVKKMKNYWRQLLNAKLITQRKFDNLTKAERGGLSELDKAGFIKRQLVETRQITKHVAQILDSRMNTKYDENDKLIREVKVITLKSKLVSDFRKDFQFYKVREINNYHHAHDAYLNAVVGTALIKKYPKLESEFVYGDYKVYDVRKMIAKSEQEIGKATAKYFFYSNIMNFFKTEITLANGEIRKRPLIETNGETGEIVWDKGRDFATVRKVLSMPQVNIVKKTEVQTGGFSKESILPKRNSDKLIARKKDWDPKKYGGFDSPTVAYSVLVVAKVEKGKSKKLKSVKELLGITIMERSSFEKNPIDFLEAKGYKEVKKDLIIKLPKYSLFELENGRKRMLASAGELQKGNELALPSKYVNFLYLASHYEKLKGSPEDNEQKQLFVEQHKHYLDEIIEQISEFSKRVILADANLDKVLSAYNKHRDKPIREQAENIIHLFTLTNLGAPAAFKYFDTTIDRKRYTSTKEVLDATLIHQSITGLYETRIDLSQLGGDSGGSSGGSSGSETPGTSESATPESSGGSSGGSSALLERILARDNLITALKRVEANQGAPGIDGVSTDQLRDYIRAHWSTIHAQLLAGTYRPAPVRRVEIPKPGGGTRQLGIPTVVDRLIQQAILQELTPIFDPDFSSSSFGFRPGRNAHDAVRQAQGYIQEGYRYVVDMDLEKFFDRVNHDILMSRVARKVKDKRVLKLIRAYLQAGVMIEGVKVQTEEGTPQGGPLSPLLANILLDDLDKELEKRGLKFCRYADDCNIYVKSLRAGQRVKQSIQRFLEKTLKLKVNEEKSAVDRPWKRAFLGFSFTPERKARIRLAPRSIQRLKQRIRQLTNPNWSISMPERIHRVNQYVMGWIGYFRLVETPSVLQTIEGWIRRRLRLCQWLQWKRVRTRIRELRALGLKETAVMEIANTRKGAWRTTKTPQLHQALGKTYWTAQGLKSLTQRYFELRQGSGGSKRTADGSEFEPKKKRKV

SEQ ID NO: 957 - protein, 1878 aa, synthetic construct
MKRTADGSEFESPKKKRKVDKKYSIGLDIGTNSVGWAVITDEYKVPSKKFKVLGNTDRHSIKKNLIGALLFDSGETAEATRLKRTARRRYTRRKNRICYLQEIFSNEMAKVDDSFFHRLEESFLVEEDKKHERHPIFGNIVDEVAYHEKYPTIYHLRKKLVDSTDKADLRLIYLALAHMIKFRGHFLIEGDLNPDNSDVDKLFIQLVQTYNQLFEENPINASGVDAKAILSARLSKSRRLENLIAQLPGEKKNGLFGNLIALSLGLTPNFKSNFDLAEDAKLQLSKDTYDDDLDNLLAQIGDQYADLFLAAKNLSDAILLSDILRVNTEITKAPLSASMIKRYDEHHQDLTLLKALVRQQLPEKYKEIFFDQSKNGYAGYIDGGASQEEFYKFIKPILEKMDGTEELLVKLNREDLLRKQRTFDNGSIPHQIHLGELHAILRRQEDFYPFLKDNREKIEKILTFRIPYYVGPLARGNSRFAWMTRKSEETITPWNFEEVVDKGASAQSFIERMTNFDKNLPNEKVLPKHSLLYEYFTVYNELTKVKYVTEGMRKPAFLSGEQKKAIVDLLFKTNRKVTVKQLKEDYFKKIECFDSVEISGVEDRFNASLGTYHDLLKIIKDKDFLDNEENEDILEDIVLTLTLFEDREMIEERLKTYAHLFDDKVMKQLKRRRYTGWGRLSRKLINGIRDKQSGKTILDFLKSDGFANRNFMQLIHDDSLTFKEDIQKAQVSGQGDSLHEHIANLAGSPAIKKGILQTVKVVDELVKVMGRHKPENIVIEMARENQTTQKGQKNSRERMKRIEEGIKELGSQILKEHPVENTQLQNEKLYLYYLQNGRDMYVDQELDINRLSDYDVDAIVPQSFLKDDSIDNKVLTRSDKNRGKSDNVPSEEVVKKMKNYWRQLLNAKLITQRKFDNLTKAERGGLSELDKAGFIKRQLVETRQITKHVAQILDSRMNTKYDENDKLIREVKVITLKSKLVSDFRKDFQFYKVREINNYHHAHDAYLNAVVGTALIKKYPKLESEFVYGDYKVYDVRKMIAKSEQEIGKATAKYFFYSNIMNFFKTEITLANGEIRKRPLIETNGETGEIVWDKGRDFATVRKVLSMPQVNIVKKTEVQTGGFSKESILPKRNSDKLIARKKDWDPKKYGGFDSPTVAYSVLVVAKVEKGKSKKLKSVKELLGITIMERSSFEKNPIDFLEAKGYKEVKKDLIIKLPKYSLFELENGRKRMLASAGELQKGNELALPSKYVNFLYLASHYEKLKGSPEDNEQKQLFVEQHKHYLDEIIEQISEFSKRVILADANLDKVLSAYNKHRDKPIREQAENIIHLFTLTNLGAPAAFKYFDTTIDRKRYTSTKEVLDATLIHQSITGLYETRIDLSQLGGDSGGSSGGSSGSETPGTSESATPESSGGSSGGSSIAQKAINIFEKVQVFQRKIYLSTKADNKRKFGVLYDKVYRKDILKVAWFYVKRNKGSAGIDDFTIEEIEAYGVQKFLDEIEDQLRNKKYQPKAVKRVYIPKANGKKRPLGIPTVRDRVVQTAVKIVIEPIFEADFQEFSYGFRPKRSANQAIREIYKYLNYGCEWVIDADLKGYFDTIPHDKLLLLVKERVTDKSIIKLLSLWLEAGIMEDNQVRSNILGTPQGGVISPLLANIYLNALDRYWKNNRLEGRGHDAHLIRYADDFVILCSNNPKKYYQYAKQRIDKLGLTLNEEKTRIVHATEGFDFLGYTLRKSKSHKSGKYKTYYYPSRKSMKSIKGKVKDVIQTGQHLNLPDVMERLNPMLRGWANYFKAGNSKQHFKSIDNYVIYNLTIMLRKKHKKSGKGWREHPPSWYYNYFGLVCLRKLSTNINDDSQRYGRSGGSKRTADGSEFEPKKKRKV

SEQ ID NO: 958 - protein, 1873 aa, synthetic construct
MKRTADGSEFESPKKKRKVDKKYSIGLDIGTNSVGWAVITDEYKVPSKKFKVLGNTDRHSIKKNLIGALLFDSGETAEATRLKRTARRRYTRRKNRICYLQEIFSNEMAKVDDSFFHRLEESFLVEEDKKHERHPIFGNIVDEVAYHEKYPTIYHLRKKLVDSTDKADLRLIYLALAHMIKFRGHFLIEGDLNPDNSDVDKLFIQLVQTYNQLFEENPINASGVDAKAILSARLSKSRRLENLIAQLPGEKKNGLFGNLIALSLGLTPNFKSNFDLAEDAKLQLSKDTYDDDLDNLLAQIGDQYADLFLAAKNLSDAILLSDILRVNTEITKAPLSASMIKRYDEHHQDLTLLKALVRQQLPEKYKEIFFDQSKNGYAGYIDGGASQEEFYKFIKPILEKMDGTEELLVKLNREDLLRKQRTFDNGSIPHQIHLGELHAILRRQEDFYPFLKDNREKIEKILTFRIPYYVGPLARGNSRFAWMTRKSEETITPWNFEEVVDKGASAQSFIERMTNFDKNLPNEKVLPKHSLLYEYFTVYNELTKVKYVTEGMRKPAFLSGEQKKAIVDLLFKTNRKVTVKQLKEDYFKKIECFDSVEISGVEDRFNASLGTYHDLLKIIKDKDFLDNEENEDILEDIVLTLTLFEDREMIEERLKTYAHLFDDKVMKQLKRRRYTGWGRLSRKLINGIRDKQSGKTILDFLKSDGFANRNFMQLIHDDSLTFKEDIQKAQVSGQGDSLHEHIANLAGSPAIKKGILQTVKVVDELVKVMGRHKPENIVIEMARENQTTQKGQKNSRERMKRIEEGIKELGSQILKEHPVENTQLQNEKLYLYYLQNGRDMYVDQELDINRLSDYDVDAIVPQSFLKDDSIDNKVLTRSDKNRGKSDNVPSEEVVKKMKNYWRQLLNAKLITQRKFDNLTKAERGGLSELDKAGFIKRQLVETRQITKHVAQILDSRMNTKYDENDKLIREVKVITLKSKLVSDFRKDFQFYKVREINNYHHAHDAYLNAVVGTALIKKYPKLESEFVYGDYKVYDVRKMIAKSEQEIGKATAKYFFYSNIMNFFKTEITLANGEIRKRPLIETNGETGEIVWDKGRDFATVRKVLSMPQVNIVKKTEVQTGGFSKESILPKRNSDKLIARKKDWDPKKYGGFDSPTVAYSVLVVAKVEKGKSKKLKSVKELLGITIMERSSFEKNPIDFLEAKGYKEVKKDLIIKLPKYSLFELENGRKRMLASAGELQKGNELALPSKYVNFLYLASHYEKLKGSPEDNEQKQLFVEQHKHYLDEIIEQISEFSKRVILADANLDKVLSAYNKHRDKPIREQAENIIHLFTLTNLGAPAAFKYFDTTIDRKRYTSTKEVLDATLIHQSITGLYETRIDLSQLGGDSGGSSGGSSGSETPGTSESATPESSGGSSGGSSVPPALWGSRHNQRRFLRNVKKFISLGKHAKLSPQELTWKMKVQDCAWLRGSPGACSVPAAEHRRREGVLARLLCWLMGTYVVELLRSFFYVTETTFQKNRLFFYRKSVWSPLQTLGVRQHCTSVRLRELSAAEVRRQHEARATLLTSRLRFLPKPGGLRPIVNMDYVAGARALCRDKKIQHLTSQVKTLFSVLNYERARRPRLLGASVLGMDDIHRAWHDFVLRVRAQDPAPRLYFVKVDVTGAYDALPQDRLAEVVANVLRPHENTYCLRRYAVVRRTAQGHVRRSFKRHVSTFTDLPPYMRQFVERLQETTSLRDSVVIEQSYSLNEASSGLFQLFLSLVYSHVIRIGGNLLLRLVDDFLLITPHLKRAQAFLRTLVRGVPEYGCSANLQKTAVNFPVEDMALGSTAPLQLPAHCLFPWCGLLLDTQTLEVSGGSKRTADGSEFEPKKKRKV

SEQ ID NO: 959 - protein, 1738 aa, synthetic construct
MKRTADGSEFESPKKKRKVDKKYSIGLDIGTNSVGWAVITDEYKVPSKKFKVLGNTDRHSIKKNLIGALLFDSGETAEATRLKRTARRRYTRRKNRICYLQEIFSNEMAKVDDSFFHRLEESFLVEEDKKHERHPIFGNIVDEVAYHEKYPTIYHLRKKLVDSTDKADLRLIYLALAHMIKFRGHFLIEGDLNPDNSDVDKLFIQLVQTYNQLFEENPINASGVDAKAILSARLSKSRRLENLIAQLPGEKKNGLFGNLIALSLGLTPNFKSNFDLAEDAKLQLSKDTYDDDLDNLLAQIGDQYADLFLAAKNLSDAILLSDILRVNTEITKAPLSASMIKRYDEHHQDLTLLKALVRQQLPEKYKEIFFDQSKNGYAGYIDGGASQEEFYKFIKPILEKMDGTEELLVKLNREDLLRKQRTFDNGSIPHQIHLGELHAILRRQEDFYPFLKDNREKIEKILTFRIPYYVGPLARGNSRFAWMTRKSEETITPWNFEEVVDKGASAQSFIERMTNFDKNLPNEKVLPKHSLLYEYFTVYNELTKVKYVTEGMRKPAFLSGEQKKAIVDLLFKTNRKVTVKQLKEDYFKKIECFDSVEISGVEDRFNASLGTYHDLLKIIKDKDFLDNEENEDILEDIVLTLTLFEDREMIEERLKTYAHLFDDKVMKQLKRRRYTGWGRLSRKLINGIRDKQSGKTILDFLKSDGFANRNFMQLIHDDSLTFKEDIQKAQVSGQGDSLHEHIANLAGSPAIKKGILQTVKVVDELVKVMGRHKPENIVIEMARENQTTQKGQKNSRERMKRIEEGIKELGSQILKEHPVENTQLQNEKLYLYYLQNGRDMYVDQELDINRLSDYDVDAIVPQSFLKDDSIDNKVLTRSDKNRGKSDNVPSEEVVKKMKNYWRQLLNAKLITQRKFDNLTKAERGGLSELDKAGFIKRQLVETRQITKHVAQILDSRMNTKYDENDKLIREVKVITLKSKLVSDFRKDFQFYKVREINNYHHAHDAYLNAVVGTALIKKYPKLESEFVYGDYKVYDVRKMIAKSEQEIGKATAKYFFYSNIMNFFKTEITLANGEIRKRPLIETNGETGEIVWDKGRDFATVRKVLSMPQVNIVKKTEVQTGGFSKESILPKRNSDKLIARKKDWDPKKYGGFDSPTVAYSVLVVAKVEKGKSKKLKSVKELLGITIMERSSFEKNPIDFLEAKGYKEVKKDLIIKLPKYSLFELENGRKRMLASAGELQKGNELALPSKYVNFLYLASHYEKLKGSPEDNEQKQLFVEQHKHYLDEIIEQISEFSKRVILADANLDKVLSAYNKHRDKPIREQAENIIHLFTLTNLGAPAAFKYFDTTIDRKRYTSTKEVLDATLIHQSITGLYETRIDLSQLGGDSGGSSGGSSGSETPGTSESATPESSGGSSGGSSITPLVSFTSFAQFEQALRDSRVSAHSGASFSNSLEVDRLVKSARELYGRGLPPIVSSRTFSLLFGVSPRLISAMTKSPEKYWRTFEIKKRSGKGRNIAAPRVFLKTVQRFLLRFVLEKIPIHPNAFGFAPGKGIFKHAERHLKARFVLTLDIADFFPSISWTQVRDIFANIGFPDGVPSLLADLCTRNKVFPQGAPTSPYLSNLIFLKTDEALTEAANQFEMRYSRYADDLTFSCDSQPSDEARLAFEQIIRDAGFRIQHSKTRLRGPSQAREVTGLLVNEKIQPSRHTRRLLRAKFHSGGSKRTADGSEFEPKKKRKV

SEQ ID NO: 960 - protein, 1761 aa, synthetic construct
MKRTADGSEFESPKKKRKVDKKYSIGLDIGTNSVGWAVITDEYKVPSKKFKVLGNTDRHSIKKNLIGALLFDSGETAEATRLKRTARRRYTRRKNRICYLQEIFSNEMAKVDDSFFHRLEESFLVEEDKKHERHPIFGNIVDEVAYHEKYPTIYHLRKKLVDSTDKADLRLIYLALAHMIKFRGHFLIEGDLNPDNSDVDKLFIQLVQTYNQLFEENPINASGVDAKAILSARLSKSRRLENLIAQLPGEKKNGLFGNLIALSLGLTPNFKSNFDLAEDAKLQLSKDTYDDDLDNLLAQIGDQYADLFLAAKNLSDAILLSDILRVNTEITKAPLSASMIKRYDEHHQDLTLLKALVRQQLPEKYKEIFFDQSKNGYAGYIDGGASQEEFYKFIKPILEKMDGTEELLVKLNREDLLRKQRTFDNGSIPHQIHLGELHAILRRQEDFYPFLKDNREKIEKILTFRIPYYVGPLARGNSRFAWMTRKSEETITPWNFEEVVDKGASAQSFIERMTNFDKNLPNEKVLPKHSLLYEYFTVYNELTKVKYVTEGMRKPAFLSGEQKKAIVDLLFKTNRKVTVKQLKEDYFKKIECFDSVEISGVEDRFNASLGTYHDLLKIIKDKDFLDNEENEDILEDIVLTLTLFEDREMIEERLKTYAHLFDDKVMKQLKRRRYTGWGRLSRKLINGIRDKQSGKTILDFLKSDGFANRNFMQLIHDDSLTFKEDIQKAQVSGQGDSLHEHIANLAGSPAIKKGILQTVKVVDELVKVMGRHKPENIVIEMARENQTTQKGQKNSRERMKRIEEGIKELGSQILKEHPVENTQLQNEKLYLYYLQNGRDMYVDQELDINRLSDYDVDAIVPQSFLKDDSIDNKVLTRSDKNRGKSDNVPSEEVVKKMKNYWRQLLNAKLITQRKFDNLTKAERGGLSELDKAGFIKRQLVETRQITKHVAQILDSRMNTKYDENDKLIREVKVITLKSKLVSDFRKDFQFYKVREINNYHHAHDAYLNAVVGTALIKKYPKLESEFVYGDYKVYDVRKMIAKSEQEIGKATAKYFFYSNIMNFFKTEITLANGEIRKRPLIETNGETGEIVWDKGRDFATVRKVLSMPQVNIVKKTEVQTGGFSKESILPKRNSDKLIARKKDWDPKKYGGFDSPTVAYSVLVVAKVEKGKSKKLKSVKELLGITIMERSSFEKNPIDFLEAKGYKEVKKDLIIKLPKYSLFELENGRKRMLASAGELQKGNELALPSKYVNFLYLASHYEKLKGSPEDNEQKQLFVEQHKHYLDEIIEQISEFSKRVILADANLDKVLSAYNKHRDKPIREQAENIIHLFTLTNLGAPAAFKYFDTTIDRKRYTSTKEVLDATLIHQSITGLYETRIDLSQLGGDSGGSSGGSSGSETPGTSESATPESSGGSSGGSSSSGSQLRVEIRGRRSQPIISSWVSLLESTLFTVSPSTTQLSPTHKSLSYPNYNFIDHIDADLSPHMTVRHILAADLGISVQLISRILANKTQYYRSFEIIRKNGNKRLIEAPRTYLKVLMRYINHHLLTGLAIHDSVHSYRQGKSFLTNAQIHVAKQYVFNLDIENYFGCINKRQVRELFSINDFTASAATLLSELCTFNDRLPQGAPTSPIISNAILFKIDQSMHRYCEKNNLCYTRYSDDITLSGNSRQSIVKAKSRLIAMIHGAGFKINDKKTRLMPYHKQQLVTGVVVNKEATPARNELRRIRAKFHSGGSKRTADGSGGSKRTADGSEFEPKKKRKV

SEQ ID NO: 961 - protein, 1902 aa, synthetic construct
MKRTADGSEFESPKKKRKVDKKYSIGLDIGTNSVGWAVITDEYKVPSKKFKVLGNTDRHSIKKNLIGALLFDSGETAEATRLKRTARRRYTRRKNRICYLQEIFSNEMAKVDDSFFHRLEESFLVEEDKKHERHPIFGNIVDEVAYHEKYPTIYHLRKKLVDSTDKADLRLIYLALAHMIKFRGHFLIEGDLNPDNSDVDKLFIQLVQTYNQLFEENPINASGVDAKAILSARLSKSRRLENLIAQLPGEKKNGLFGNLIALSLGLTPNFKSNFDLAEDAKLQLSKDTYDDDLDNLLAQIGDQYADLFLAAKNLSDAILLSDILRVNTEITKAPLSASMIKRYDEHHQDLTLLKALVRQQLPEKYKEIFFDQSKNGYAGYIDGGASQEEFYKFIKPILEKMDGTEELLVKLNREDLLRKQRTFDNGSIPHQIHLGELHAILRRQEDFYPFLKDNREKIEKILTFRIPYYVGPLARGNSRFAWMTRKSEETITPWNFEEVVDKGASAQSFIERMTNFDKNLPNEKVLPKHSLLYEYFTVYNELTKVKYVTEGMRKPAFLSGEQKKAIVDLLFKTNRKVTVKQLKEDYFKKIECFDSVEISGVEDRFNASLGTYHDLLKIIKDKDFLDNEENEDILEDIVLTLTLFEDREMIEERLKTYAHLFDDKVMKQLKRRRYTGWGRLSRKLINGIRDKQSGKTILDFLKSDGFANRNFMQLIHDDSLTFKEDIQKAQVSGQGDSLHEHIANLAGSPAIKKGILQTVKVVDELVKVMGRHKPENIVIEMARENQTTQKGQKNSRERMKRIEEGIKELGSQILKEHPVENTQLQNEKLYLYYLQNGRDMYVDQELDINRLSDYDVDAIVPQSFLKDDSIDNKVLTRSDKNRGKSDNVPSEEVVKKMKNYWRQLLNAKLITQRKFDNLTKAERGGLSELDKAGFIKRQLVETRQITKHVAQILDSRMNTKYDENDKLIREVKVITLKSKLVSDFRKDFQFYKVREINNYHHAHDAYLNAVVGTALIKKYPKLESEFVYGDYKVYDVRKMIAKSEQEIGKATAKYFFYSNIMNFFKTEITLANGEIRKRPLIETNGETGEIVWDKGRDFATVRKVLSMPQVNIVKKTEVQTGGFSKESILPKRNSDKLIARKKDWDPKKYGGFDSPTVAYSVLVVAKVEKGKSKKLKSVKELLGITIMERSSFEKNPIDFLEAKGYKEVKKDLIIKLPKYSLFELENGRKRMLASAGELQKGNELALPSKYVNFLYLASHYEKLKGSPEDNEQKQLFVEQHKHYLDEIIEQISEFSKRVILADANLDKVLSAYNKHRDKPIREQAENIIHLFTLTNLGAPAAFKYFDTTIDRKRYTSTKEVLDATLIHQSITGLYETRIDLSQLGGDSGGSSGGSSGSETPGTSESATPESSGGSSGGSSRSHEGQRQQKISRESLRQREAVKPSGYAGAPSSSSAQIDPSSREANNDLLERMLRGDNLRLAYKRVVQNGGAPGVDNVTVANLQAYLKTHWEAVKTELLAGTYRPMPVKRVEIPKPGGGVRLLGIPTVMDRFLQQALLQVMTPIFDADFSRHSYGFRPGKRAHDAVKQAQRYMQEGFRWVVDMDLAKFFDRVNHDMLMARVARKVTDKCVLKLIRAYLNAGVMANGVTEKTGEGTPQGGPLSPLLANILLDDLDKELTERGLRFVRYADDCNIFVASKRAGERVMDSVTRFVEGKLKLKVNREKSAVDRPWNRKFLGFSFLRDKKATIRLAPQTISRFKEKVRELTNRTRSMSMENRIAQLNRYLMGWIGYFRLASAKGHCEKFDQWIRRRLRMCLWKQWKRVRTRIRELRALGVPEWACFVMANSRRGAWEMSRNTNNALPTSYWEAKGLKSLLSRYLELCSGGSKRTADGSEFEPKKKRKV

SEQ ID NO: 962 - protein, 1908 aa, synthetic construct
MKRTADGSEFESPKKKRKVDKKYSIGLDIGTNSVGWAVITDEYKVPSKKFKVLGNTDRHSIKKNLIGALLFDSGETAEATRLKRTARRRYTRRKNRICYLQEIFSNEMAKVDDSFFHRLEESFLVEEDKKHERHPIFGNIVDEVAYHEKYPTIYHLRKKLVDSTDKADLRLIYLALAHMIKFRGHFLIEGDLNPDNSDVDKLFIQLVQTYNQLFEENPINASGVDAKAILSARLSKSRRLENLIAQLPGEKKNGLFGNLIALSLGLTPNFKSNFDLAEDAKLQLSKDTYDDDLDNLLAQIGDQYADLFLAAKNLSDAILLSDILRVNTEITKAPLSASMIKRYDEHHQDLTLLKALVRQQLPEKYKEIFFDQSKNGYAGYIDGGASQEEFYKFIKPILEKMDGTEELLVKLNREDLLRKQRTFDNGSIPHQIHLGELHAILRRQEDFYPFLKDNREKIEKILTFRIPYYVGPLARGNSRFAWMTRKSEETITPWNFEEVVDKGASAQSFIERMTNFDKNLPNEKVLPKHSLLYEYFTVYNELTKVKYVTEGMRKPAFLSGEQKKAIVDLLFKTNRKVTVKQLKEDYFKKIECFDSVEISGVEDRFNASLGTYHDLLKIIKDKDFLDNEENEDILEDIVLTLTLFEDREMIEERLKTYAHLFDDKVMKQLKRRRYTGWGRLSRKLINGIRDKQSGKTILDFLKSDGFANRNFMQLIHDDSLTFKEDIQKAQVSGQGDSLHEHIANLAGSPAIKKGILQTVKVVDELVKVMGRHKPENIVIEMARENQTTQKGQKNSRERMKRIEEGIKELGSQILKEHPVENTQLQNEKLYLYYLQNGRDMYVDQELDINRLSDYDVDAIVPQSFLKDDSIDNKVLTRSDKNRGKSDNVPSEEVVKKMKNYWRQLLNAKLITQRKFDNLTKAERGGLSELDKAGFIKRQLVETRQITKHVAQILDSRMNTKYDENDKLIREVKVITLKSKLVSDFRKDFQFYKVREINNYHHAHDAYLNAVVGTALIKKYPKLESEFVYGDYKVYDVRKMIAKSEQEIGKATAKYFFYSNIMNFFKTEITLANGEIRKRPLIETNGETGEIVWDKGRDFATVRKVLSMPQVNIVKKTEVQTGGFSKESILPKRNSDKLIARKKDWDPKKYGGFDSPTVAYSVLVVAKVEKGKSKKLKSVKELLGITIMERSSFEKNPIDFLEAKGYKEVKKDLIIKLPKYSLFELENGRKRMLASAGELQKGNELALPSKYVNFLYLASHYEKLKGSPEDNEQKQLFVEQHKHYLDEIIEQISEFSKRVILADANLDKVLSAYNKHRDKPIREQAENIIHLFTLTNLGAPAAFKYFDTTIDRKRYTSTKEVLDATLIHQSITGLYETRIDLSQLGGDSGGSSGGSSGSETPGTSESATPESSGGSSGGSSTSSRKEQGQQKTLSRGSLQEEVVNTQGTVRAQSSYPAQVRSDTCGTEYTLLDEMLKLDNMMAALKRVEQNKGAAGVDEVDVKSLRPYLKEHWFRIREELLEGTYKPQPVRRVEIPKSDGGVRLLGIPTLVDRLIQQGLAQVLTPIFDPNFSNSSYGFRPNRSTHQAVKQAKQYIEDGYRHVVDLDLEKFFDRVNHDILMARVTRKVKDKRVLKLIRAYLNAGVMANGVCVRSEQGVPQGGPLSPILSNIILDDLDKELERRGHRFVRYADDCNIYVKTVRAGQRVMEGVKRFVEDELKLKVNEQKSAVDRPWKRKFLGFSFTPERKTRTRIAPKARAKFEDKVRELTSRSRSMSMAKRIDQLNVYLRGWMGYFRLADTRSVIESLDQWTRRRLRMCYLKQWKKPKSVYRNLVKLGLSADFARRISGSGKGYWRLSNTPQMNKALGLAFWANQGLLSLVHLYDKHRSVSSGGSKRTADGSEFEPKKKRKV

SEQ ID NO: 963 - protein, 1857 aa, synthetic construct
MKRTADGSEFESPKKKRKVDKKYSIGLDIGTNSVGWAVITDEYKVPSKKFKVLGNTDRHSIKKNLIGALLFDSGETAEATRLKRTARRRYTRRKNRICYLQEIFSNEMAKVDDSFFHRLEESFLVEEDKKHERHPIFGNIVDEVAYHEKYPTIYHLRKKLVDSTDKADLRLIYLALAHMIKFRGHFLIEGDLNPDNSDVDKLFIQLVQTYNQLFEENPINASGVDAKAILSARLSKSRRLENLIAQLPGEKKNGLFGNLIALSLGLTPNFKSNFDLAEDAKLQLSKDTYDDDLDNLLAQIGDQYADLFLAAKNLSDAILLSDILRVNTEITKAPLSASMIKRYDEHHQDLTLLKALVRQQLPEKYKEIFFDQSKNGYAGYIDGGASQEEFYKFIKPILEKMDGTEELLVKLNREDLLRKQRTFDNGSIPHQIHLGELHAILRRQEDFYPFLKDNREKIEKILTFRIPYYVGPLARGNSRFAWMTRKSEETITPWNFEEVVDKGASAQSFIERMTNFDKNLPNEKVLPKHSLLYEYFTVYNELTKVKYVTEGMRKPAFLSGEQKKAIVDLLFKTNRKVTVKQLKEDYFKKIECFDSVEISGVEDRFNASLGTYHDLLKIIKDKDFLDNEENEDILEDIVLTLTLFEDREMIEERLKTYAHLFDDKVMKQLKRRRYTGWGRLSRKLINGIRDKQSGKTILDFLKSDGFANRNFMQLIHDDSLTFKEDIQKAQVSGQGDSLHEHIANLAGSPAIKKGILQTVKVVDELVKVMGRHKPENIVIEMARENQTTQKGQKNSRERMKRIEEGIKELGSQILKEHPVENTQLQNEKLYLYYLQNGRDMYVDQELDINRLSDYDVDAIVPQSFLKDDSIDNKVLTRSDKNRGKSDNVPSEEVVKKMKNYWRQLLNAKLITQRKFDNLTKAERGGLSELDKAGFIKRQLVETRQITKHVAQILDSRMNTKYDENDKLIREVKVITLKSKLVSDFRKDFQFYKVREINNYHHAHDAYLNAVVGTALIKKYPKLESEFVYGDYKVYDVRKMIAKSEQEIGKATAKYFFYSNIMNFFKTEITLANGEIRKRPLIETNGETGEIVWDKGRDFATVRKVLSMPQVNIVKKTEVQTGGFSKESILPKRNSDKLIARKKDWDPKKYGGFDSPTVAYSVLVVAKVEKGKSKKLKSVKELLGITIMERSSFEKNPIDFLEAKGYKEVKKDLIIKLPKYSLFELENGRKRMLASAGELQKGNELALPSKYVNFLYLASHYEKLKGSPEDNEQKQLFVEQHKHYLDEIIEQISEFSKRVILADANLDKVLSAYNKHRDKPIREQAENIIHLFTLTNLGAPAAFKYFDTTIDRKRYTSTKEVLDATLIHQSITGLYETRIDLSQLGGDSGGSSGGSSGSETPGTSESATPESSGGSSGGSSWEQVWERENLLAALKRVERNGGAPGIDGMTVEELRPYLREHWLEIRETLDQQSYQPSPVRRVEIDKPEGGVRLLGIPTVLDRFLQQAMAQVLTPLFEPQFSPASYGFRPGRSAHEAVKQAQEYVQAGYEWVVDIDLERYFDQVNHDMLMARVARVVADKRVLKEIRAYLKSGVMVNGVVQDTGEGTPQGGPLSPLLSNIMLDDLDKELEKRGHKFVRYADDCNVYVRTQRAGERVMESVKAYLEKKLKLKVNPKKSKVERATRVKFLGFSFYERNGEVRVRVASQSVARFRKKLRGLTKRTRSGKLEEVIETINGYLMGWMAYYRLADTPSVFAGLDSWIRRRLRQMIWKRWKRGKTRYRELVKLGVPRGRAALGAVGKSPWHMSKTPVVNEALSNAYLRNSGLKSLKARYQELRVASGGSKRTADGSEFEPKKKRKV

SEQ ID NO: 964 - protein, 1858 aa, synthetic construct
MKRTADGSEFESPKKKRKVDKKYSIGLDIGTNSVGWAVITDEYKVPSKKFKVLGNTDRHSIKKNLIGALLFDSGETAEATRLKRTARRRYTRRKNRICYLQEIFSNEMAKVDDSFFHRLEESFLVEEDKKHERHPIFGNIVDEVAYHEKYPTIYHLRKKLVDSTDKADLRLIYLALAHMIKFRGHFLIEGDLNPDNSDVDKLFIQLVQTYNQLFEENPINASGVDAKAILSARLSKSRRLENLIAQLPGEKKNGLFGNLIALSLGLTPNFKSNFDLAEDAKLQLSKDTYDDDLDNLLAQIGDQYADLFLAAKNLSDAILLSDILRVNTEITKAPLSASMIKRYDEHHQDLTLLKALVRQQLPEKYKEIFFDQSKNGYAGYIDGGASQEEFYKFIKPILEKMDGTEELLVKLNREDLLRKQRTFDNGSIPHQIHLGELHAILRRQEDFYPFLKDNREKIEKILTFRIPYYVGPLARGNSRFAWMTRKSEETITPWNFEEVVDKGASAQSFIERMTNFDKNLPNEKVLPKHSLLYEYFTVYNELTKVKYVTEGMRKPAFLSGEQKKAIVDLLFKTNRKVTVKQLKEDYFKKIECFDSVEISGVEDRFNASLGTYHDLLKIIKDKDFLDNEENEDILEDIVLTLTLFEDREMIEERLKTYAHLFDDKVMKQLKRRRYTGWGRLSRKLINGIRDKQSGKTILDFLKSDGFANRNFMQLIHDDSLTFKEDIQKAQVSGQGDSLHEHIANLAGSPAIKKGILQTVKVVDELVKVMGRHKPENIVIEMARENQTTQKGQKNSRERMKRIEEGIKELGSQILKEHPVENTQLQNEKLYLYYLQNGRDMYVDQELDINRLSDYDVDAIVPQSFLKDDSIDNKVLTRSDKNRGKSDNVPSEEVVKKMKNYWRQLLNAKLITQRKFDNLTKAERGGLSELDKAGFIKRQLVETRQITKHVAQILDSRMNTKYDENDKLIREVKVITLKSKLVSDFRKDFQFYKVREINNYHHAHDAYLNAVVGTALIKKYPKLESEFVYGDYKVYDVRKMIAKSEQEIGKATAKYFFYSNIMNFFKTEITLANGEIRKRPLIETNGETGEIVWDKGRDFATVRKVLSMPQVNIVKKTEVQTGGFSKESILPKRNSDKLIARKKDWDPKKYGGFDSPTVAYSVLVVAKVEKGKSKKLKSVKELLGITIMERSSFEKNPIDFLEAKGYKEVKKDLIIKLPKYSLFELENGRKRMLASAGELQKGNELALPSKYVNFLYLASHYEKLKGSPEDNEQKQLFVEQHKHYLDEIIEQISEFSKRVILADANLDKVLSAYNKHRDKPIREQAENIIHLFTLTNLGAPAAFKYFDTTIDRKRYTSTKEVLDATLIHQSITGLYETRIDLSQLGGDSGGSSGGSSGSETPGTSESATPESSGGSSGGSSLNQILARPNMIQALKRVEANKGRHGVDMMPVQTLRQHILENWESIKAQILTGTYEPQPVRRVEIPKPDGGVRLLGIPTVTDRLIQQAISQILSKEYDQTFSDNSYGFRPNRSAHDAVRKAKGYMKEGYRWVVDMDLEKFFDKVNHDRLMATLAKRIHDKSLLKLIRKYLQAGVMINGVVSSTEEGTPQGGPLSPLLSNIVLDELDKELEKRGHKFVRYADDCNIYVKSKRAGDRTIASVQRFVEGKLRLKMNESKSAVDRPWNRKFLGFSFSHHKEPKVRVAKTSLQRMKKKIREITSRKKPVPMEHRIEKLNQYLIGWCGYFALADTPSIFSRLDGWIKRRLRMCLWKNWKKPRTRVRNLIRLKVPYGKAYEWGNTRKGYWRISKSPILHRTLGNSYWGSQGLKSLQSRYESLRYSSSGGSKRTADGSEFEPKKKRKV

SEQ ID NO: 965 - protein, 1858 aa, synthetic construct
MKRTADGSEFESPKKKRKVDKKYSIGLDIGTNSVGWAVITDEYKVPSKKFKVLGNTDRHSIKKNLIGALLFDSGETAEATRLKRTARRRYTRRKNRICYLQEIFSNEMAKVDDSFFHRLEESFLVEEDKKHERHPIFGNIVDEVAYHEKYPTIYHLRKKLVDSTDKADLRLIYLALAHMIKFRGHFLIEGDLNPDNSDVDKLFIQLVQTYNQLFEENPINASGVDAKAILSARLSKSRRLENLIAQLPGEKKNGLFGNLIALSLGLTPNFKSNFDLAEDAKLQLSKDTYDDDLDNLLAQIGDQYADLFLAAKNLSDAILLSDILRVNTEITKAPLSASMIKRYDEHHQDLTLLKALVRQQLPEKYKEIFFDQSKNGYAGYIDGGASQEEFYKFIKPILEKMDGTEELLVKLNREDLLRKQRTFDNGSIPHQIHLGELHAILRRQEDFYPFLKDNREKIEKILTFRIPYYVGPLARGNSRFAWMTRKSEETITPWNFEEVVDKGASAQSFIERMTNFDKNLPNEKVLPKHSLLYEYFTVYNELTKVKYVTEGMRKPAFLSGEQKKAIVDLLFKTNRKVTVKQLKEDYFKKIECFDSVEISGVEDRFNASLGTYHDLLKIIKDKDFLDNEENEDILEDIVLTLTLFEDREMIEERLKTYAHLFDDKVMKQLKRRRYTGWGRLSRKLINGIRDKQSGKTILDFLKSDGFANRNFMQLIHDDSLTFKEDIQKAQVSGQGDSLHEHIANLAGSPAIKKGILQTVKVVDELVKVMGRHKPENIVIEMARENQTTQKGQKNSRERMKRIEEGIKELGSQILKEHPVENTQLQNEKLYLYYLQNGRDMYVDQELDINRLSDYDVDAIVPQSFLKDDSIDNKVLTRSDKNRGKSDNVPSEEVVKKMKNYWRQLLNAKLITQRKFDNLTKAERGGLSELDKAGFIKRQLVETRQITKHVAQILDSRMNTKYDENDKLIREVKVITLKSKLVSDFRKDFQFYKVREINNYHHAHDAYLNAVVGTALIKKYPKLESEFVYGDYKVYDVRKMIAKSEQEIGKATAKYFFYSNIMNFFKTEITLANGEIRKRPLIETNGETGEIVWDKGRDFATVRKVLSMPQVNIVKKTEVQTGGFSKESILPKRNSDKLIARKKDWDPKKYGGFDSPTVAYSVLVVAKVEKGKSKKLKSVKELLGITIMERSSFEKNPIDFLEAKGYKEVKKDLIIKLPKYSLFELENGRKRMLASAGELQKGNELALPSKYVNFLYLASHYEKLKGSPEDNEQKQLFVEQHKHYLDEIIEQISEFSKRVILADANLDKVLSAYNKHRDKPIREQAENIIHLFTLTNLGAPAAFKYFDTTIDRKRYTSTKEVLDATLIHQSITGLYETRIDLSQLGGDSGGSSGGSSGSETPGTSESATPESSGGSSGGSSLMDLILSRENLIAALKRVERNKGSHGIDGMSVKSLRRHLYENWDSLCDSLRKGTYQPNPVRRIEIPKPNGGVRLLGIPTVTDRFIQQAIAQILTPLFDPSFSEHSYGFRPNRRGHDAVRKAREYISEGYRWVIDMDLEKFFDKVNHDKLMGILASRIQDRLVLKLIRKYLQAGIMINGVVYDAEEGTPQGGPLSPLLSNILLDKLDKELERRGHKFVRYADDCNIYMKSKKAGERVMNSITRFIEQKLKLKVNRGKSAVDRPWKRKFLGFSFTLNKKPKVRIANESIKRLKTKIREFTSRSKSIPMEVRIEKLNQYLTGWCGYFALADTPSKFKEFDEWIRRRLRMIEWKQWKNPRTRVRKLKGLGVPDQKAYEWGNSRRKYWRIASSPILHKTLDNSYWSNRGLKSLYQRYEFLRQTSGGSKRTADGSEFEPKKKRKV

SEQ ID NO: 966 - protein, 1907 aa, synthetic construct
MKRTADGSEFESPKKKRKVDKKYSIGLDIGTNSVGWAVITDEYKVPSKKFKVLGNTDRHSIKKNLIGALLFDSGETAEATRLKRTARRRYTRRKNRICYLQEIFSNEMAKVDDSFFHRLEESFLVEEDKKHERHPIFGNIVDEVAYHEKYPTIYHLRKKLVDSTDKADLRLIYLALAHMIKFRGHFLIEGDLNPDNSDVDKLFIQLVQTYNQLFEENPINASGVDAKAILSARLSKSRRLENLIAQLPGEKKNGLFGNLIALSLGLTPNFKSNFDLAEDAKLQLSKDTYDDDLDNLLAQIGDQYADLFLAAKNLSDAILLSDILRVNTEITKAPLSASMIKRYDEHHQDLTLLKALVRQQLPEKYKEIFFDQSKNGYAGYIDGGASQEEFYKFIKPILEKMDGTEELLVKLNREDLLRKQRTFDNGSIPHQIHLGELHAILRRQEDFYPFLKDNREKIEKILTFRIPYYVGPLARGNSRFAWMTRKSEETITPWNFEEVVDKGASAQSFIERMTNFDKNLPNEKVLPKHSLLYEYFTVYNELTKVKYVTEGMRKPAFLSGEQKKAIVDLLFKTNRKVTVKQLKEDYFKKIECFDSVEISGVEDRFNASLGTYHDLLKIIKDKDFLDNEENEDILEDIVLTLTLFEDREMIEERLKTYAHLFDDKVMKQLKRRRYTGWGRLSRKLINGIRDKQSGKTILDFLKSDGFANRNFMQLIHDDSLTFKEDIQKAQVSGQGDSLHEHIANLAGSPAIKKGILQTVKVVDELVKVMGRHKPENIVIEMARENQTTQKGQKNSRERMKRIEEGIKELGSQILKEHPVENTQLQNEKLYLYYLQNGRDMYVDQELDINRLSDYDVDAIVPQSFLKDDSIDNKVLTRSDKNRGKSDNVPSEEVVKKMKNYWRQLLNAKLITQRKFDNLTKAERGGLSELDKAGFIKRQLVETRQITKHVAQILDSRMNTKYDENDKLIREVKVITLKSKLVSDFRKDFQFYKVREINNYHHAHDAYLNAVVGTALIKKYPKLESEFVYGDYKVYDVRKMIAKSEQEIGKATAKYFFYSNIMNFFKTEITLANGEIRKRPLIETNGETGEIVWDKGRDFATVRKVLSMPQVNIVKKTEVQTGGFSKESILPKRNSDKLIARKKDWDPKKYGGFDSPTVAYSVLVVAKVEKGKSKKLKSVKELLGITIMERSSFEKNPIDFLEAKGYKEVKKDLIIKLPKYSLFELENGRKRMLASAGELQKGNELALPSKYVNFLYLASHYEKLKGSPEDNEQKQLFVEQHKHYLDEIIEQISEFSKRVILADANLDKVLSAYNKHRDKPIREQAENIIHLFTLTNLGAPAAFKYFDTTIDRKRYTSTKEVLDATLIHQSITGLYETRIDLSQLGGDSGGSSGGSSGSETPGTSESATPESSGGSSGGSSSSNELHRKQKTHSRASLREIAVNTQRTAKGQSISSAQTRISPCKDQGNNLMEKVVERSNMMAALRRVEQNKGAAGIDGVKTDELRNLLWDIWTDTKEQLLTGTYRPKPVRRVEIPKPNGGVRLLGIPTVLDRLIQQALLQILTSIFDPTFSEASYGFRPGKRAHTAVRVARSYVESGYDWVIDMDIEKFFDRVNHDILMARVARKVKDKRVLKLIRRYLQAGVMLGGVVVRTEEGTPQGGPLSPLLANIYLDDLDKELEKRGHKFVRYADDCNIYVKSQRAAERVMQSIREFLQKRLKLKVNEEKSCVDRPWNLKYLGFSMFKSKGKVRICLAPETIKRVKNKIREFTSRSKPIRMEDRIRRLNAYLGGWLGYFALADTSNDFASIDGWLRRRLRMCLWRQWDRVRTRLRELRALGLPEWVAHQLANTRKGPWRMSHRPLHSALNNAYWEKQGLLSLAKRHQAICQASGGSKRTADGSEFEPKKKRKV

SEQ ID NO: 967 - protein, 1858 aa, synthetic construct
MKRTADGSEFESPKKKRKVDKKYSIGLDIGTNSVGWAVITDEYKVPSKKFKVLGNTDRHSIKKNLIGALLFDSGETAEATRLKRTARRRYTRRKNRICYLQEIFSNEMAKVDDSFFHRLEESFLVEEDKKHERHPIFGNIVDEVAYHEKYPTIYHLRKKLVDSTDKADLRLIYLALAHMIKFRGHFLIEGDLNPDNSDVDKLFIQLVQTYNQLFEENPINASGVDAKAILSARLSKSRRLENLIAQLPGEKKNGLFGNLIALSLGLTPNFKSNFDLAEDAKLQLSKDTYDDDLDNLLAQIGDQYADLFLAAKNLSDAILLSDILRVNTEITKAPLSASMIKRYDEHHQDLTLLKALVRQQLPEKYKEIFFDQSKNGYAGYIDGGASQEEFYKFIKPILEKMDGTEELLVKLNREDLLRKQRTFDNGSIPHQIHLGELHAILRRQEDFYPFLKDNREKIEKILTFRIPYYVGPLARGNSRFAWMTRKSEETITPWNFEEVVDKGASAQSFIERMTNFDKNLPNEKVLPKHSLLYEYFTVYNELTKVKYVTEGMRKPAFLSGEQKKAIVDLLFKTNRKVTVKQLKEDYFKKIECFDSVEISGVEDRFNASLGTYHDLLKIIKDKDFLDNEENEDILEDIVLTLTLFEDREMIEERLKTYAHLFDDKVMKQLKRRRYTGWGRLSRKLINGIRDKQSGKTILDFLKSDGFANRNFMQLIHDDSLTFKEDIQKAQVSGQGDSLHEHIANLAGSPAIKKGILQTVKVVDELVKVMGRHKPENIVIEMARENQTTQKGQKNSRERMKRIEEGIKELGSQILKEHPVENTQLQNEKLYLYYLQNGRDMYVDQELDINRLSDYDVDAIVPQSFLKDDSIDNKVLTRSDKNRGKSDNVPSEEVVKKMKNYWRQLLNAKLITQRKFDNLTKAERGGLSELDKAGFIKRQLVETRQITKHVAQILDSRMNTKYDENDKLIREVKVITLKSKLVSDFRKDFQFYKVREINNYHHAHDAYLNAVVGTALIKKYPKLESEFVYGDYKVYDVRKMIAKSEQEIGKATAKYFFYSNIMNFFKTEITLANGEIRKRPLIETNGETGEIVWDKGRDFATVRKVLSMPQVNIVKKTEVQTGGFSKESILPKRNSDKLIARKKDWDPKKYGGFDSPTVAYSVLVVAKVEKGKSKKLKSVKELLGITIMERSSFEKNPIDFLEAKGYKEVKKDLIIKLPKYSLFELENGRKRMLASAGELQKGNELALPSKYVNFLYLASHYEKLKGSPEDNEQKQLFVEQHKHYLDEIIEQISEFSKRVILADANLDKVLSAYNKHRDKPIREQAENIIHLFTLTNLGAPAAFKYFDTTIDRKRYTSTKEVLDATLIHQSITGLYETRIDLSQLGGDSGGSSGGSSGSETPGTSESATPESSGGSSGGSSLERILSRENLIQALTRVEGNKGSHGVDEMPVQNLRAHILEHWTTIRGQLEKGTYYPQPVRRVEIPKPNGGKRKLGIPTVMDRFLQQAIAQVLTDIYDPTFSQHSYGFRPKRRGHDAVREARNYIKQGYRWVVDMDLEKFFDKVNHDRLMRTLSQRINDSRVLKLIRRYLQAGVMEDGIVRPNTEGAPQGGPLSPLLSNIVLDELDKELEKRGLHFVRYADDCNIYVRSKRAGLRVMKSITKFIEGKLKLKVNEQKSAVDRPWKRKFLGFSFTVHKEKPKIRVSKESVQRFKQRIRELTSRRKSMNMKDRIEKLNRYLVGWLGYYQLADTPSIFKGLDSWIRRRLRMIRWKEWKKVKTKYKNLMKQGINKGKAWEWANTRKAYWRIANSPILHKALGDRYWSNQGLKSLYYRYQTLRWTSGGSKRTADGSEFEPKKKRKV

SEQ ID NO: 968 - protein, 1872 aa, synthetic construct
MKRTADGSEFESPKKKRKVDKKYSIGLDIGTNSVGWAVITDEYKVPSKKFKVLGNTDRHSIKKNLIGALLFDSGETAEATRLKRTARRRYTRRKNRICYLQEIFSNEMAKVDDSFFHRLEESFLVEEDKKHERHPIFGNIVDEVAYHEKYPTIYHLRKKLVDSTDKADLRLIYLALAHMIKFRGHFLIEGDLNPDNSDVDKLFIQLVQTYNQLFEENPINASGVDAKAILSARLSKSRRLENLIAQLPGEKKNGLFGNLIALSLGLTPNFKSNFDLAEDAKLQLSKDTYDDDLDNLLAQIGDQYADLFLAAKNLSDAILLSDILRVNTEITKAPLSASMIKRYDEHHQDLTLLKALVRQQLPEKYKEIFFDQSKNGYAGYIDGGASQEEFYKFIKPILEKMDGTEELLVKLNREDLLRKQRTFDNGSIPHQIHLGELHAILRRQEDFYPFLKDNREKIEKILTFRIPYYVGPLARGNSRFAWMTRKSEETITPWNFEEVVDKGASAQSFIERMTNFDKNLPNEKVLPKHSLLYEYFTVYNELTKVKYVTEGMRKPAFLSGEQKKAIVDLLFKTNRKVTVKQLKEDYFKKIECFDSVEISGVEDRFNASLGTYHDLLKIIKDKDFLDNEENEDILEDIVLTLTLFEDREMIEERLKTYAHLFDDKVMKQLKRRRYTGWGRLSRKLINGIRDKQSGKTILDFLKSDGFANRNFMQLIHDDSLTFKEDIQKAQVSGQGDSLHEHIANLAGSPAIKKGILQTVKVVDELVKVMGRHKPENIVIEMARENQTTQKGQKNSRERMKRIEEGIKELGSQILKEHPVENTQLQNEKLYLYYLQNGRDMYVDQELDINRLSDYDVDAIVPQSFLKDDSIDNKVLTRSDKNRGKSDNVPSEEVVKKMKNYWRQLLNAKLITQRKFDNLTKAERGGLSELDKAGFIKRQLVETRQITKHVAQILDSRMNTKYDENDKLIREVKVITLKSKLVSDFRKDFQFYKVREINNYHHAHDAYLNAVVGTALIKKYPKLESEFVYGDYKVYDVRKMIAKSEQEIGKATAKYFFYSNIMNFFKTEITLANGEIRKRPLIETNGETGEIVWDKGRDFATVRKVLSMPQVNIVKKTEVQTGGFSKESILPKRNSDKLIARKKDWDPKKYGGFDSPTVAYSVLVVAKVEKGKSKKLKSVKELLGITIMERSSFEKNPIDFLEAKGYKEVKKDLIIKLPKYSLFELENGRKRMLASAGELQKGNELALPSKYVNFLYLASHYEKLKGSPEDNEQKQLFVEQHKHYLDEIIEQISEFSKRVILADANLDKVLSAYNKHRDKPIREQAENIIHLFTLTNLGAPAAFKYFDTTIDRKRYTSTKEVLDATLIHQSITGLYETRIDLSQLGGDSGGSSGGSSGSETPGTSESATPESSGGSSGGSSAQIEEFVHVERISMLMEMILSRENLLAALKRVEQNKGSHGVDGMSVKDLRRHLYENWDSIRQSLREGTYKPLPVRRVEIPKPNGGVRLLGIPTVTDRFIQQAIAQVLTKIFDPTFSNHSYGFRPGRRGHDAVREAKGYIKEGYRWVVDIDLEKFFDKVNHDKLMGILAKTIKDQILLKVIRRYLQSGVMINGVVMETDMGTPQGGPLSPLLSNIMLHELDKELEKRGHKFVRYADDCNIYVKTKKAGIRVMNSITNFIEKELKLKVNKEKSAVDRPWKRKFLGFSFTLNKTPKVRIANESVKRLKNKIREITSRSKPYPMEKRIEKLNKYLMGWCGYFALAETPSKFKELDEWIRRRLRMCLWKEWKTPKTRIRKLRGLGVPSHKAFEWGNTRKKYWRIACSPILHKTLDNSYWKRRGLRSLFERYQALRHTSGGSKRTADGSEFEPKKKRKV

SEQ ID NO: 969 - protein, 1857 aa, synthetic construct
MKRTADGSEFESPKKKRKVDKKYSIGLDIGTNSVGWAVITDEYKVPSKKFKVLGNTDRHSIKKNLIGALLFDSGETAEATRLKRTARRRYTRRKNRICYLQEIFSNEMAKVDDSFFHRLEESFLVEEDKKHERHPIFGNIVDEVAYHEKYPTIYHLRKKLVDSTDKADLRLIYLALAHMIKFRGHFLIEGDLNPDNSDVDKLFIQLVQTYNQLFEENPINASGVDAKAILSARLSKSRRLENLIAQLPGEKKNGLFGNLIALSLGLTPNFKSNFDLAEDAKLQLSKDTYDDDLDNLLAQIGDQYADLFLAAKNLSDAILLSDILRVNTEITKAPLSASMIKRYDEHHQDLTLLKALVRQQLPEKYKEIFFDQSKNGYAGYIDGGASQEEFYKFIKPILEKMDGTEELLVKLNREDLLRKQRTFDNGSIPHQIHLGELHAILRRQEDFYPFLKDNREKIEKILTFRIPYYVGPLARGNSRFAWMTRKSEETITPWNFEEVVDKGASAQSFIERMTNFDKNLPNEKVLPKHSLLYEYFTVYNELTKVKYVTEGMRKPAFLSGEQKKAIVDLLFKTNRKVTVKQLKEDYFKKIECFDSVEISGVEDRFNASLGTYHDLLKIIKDKDFLDNEENEDILEDIVLTLTLFEDREMIEERLKTYAHLFDDKVMKQLKRRRYTGWGRLSRKLINGIRDKQSGKTILDFLKSDGFANRNFMQLIHDDSLTFKEDIQKAQVSGQGDSLHEHIANLAGSPAIKKGILQTVKVVDELVKVMGRHKPENIVIEMARENQTTQKGQKNSRERMKRIEEGIKELGSQILKEHPVENTQLQNEKLYLYYLQNGRDMYVDQELDINRLSDYDVDAIVPQSFLKDDSIDNKVLTRSDKNRGKSDNVPSEEVVKKMKNYWRQLLNAKLITQRKFDNLTKAERGGLSELDKAGFIKRQLVETRQITKHVAQILDSRMNTKYDENDKLIREVKVITLKSKLVSDFRKDFQFYKVREINNYHHAHDAYLNAVVGTALIKKYPKLESEFVYGDYKVYDVRKMIAKSEQEIGKATAKYFFYSNIMNFFKTEITLANGEIRKRPLIETNGETGEIVWDKGRDFATVRKVLSMPQVNIVKKTEVQTGGFSKESILPKRNSDKLIARKKDWDPKKYGGFDSPTVAYSVLVVAKVEKGKSKKLKSVKELLGITIMERSSFEKNPIDFLEAKGYKEVKKDLIIKLPKYSLFELENGRKRMLASAGELQKGNELALPSKYVNFLYLASHYEKLKGSPEDNEQKQLFVEQHKHYLDEIIEQISEFSKRVILADANLDKVLSAYNKHRDKPIREQAENIIHLFTLTNLGAPAAFKYFDTTIDRKRYTSTKEVLDATLIHQSITGLYETRIDLSQLGGDSGGSSGGSSGSETPGTSESATPESSGGSSGGSSMERILSRENLIQALERVEKNKGSYGVDEMDVKSLRLHLHENWTSIRNEIIEGSYFPKPVRRVEIPKPNGGVRKLGIPTVMDRFLQQAIAQILTQLYDPTFSERSFGFRPHRRGHNAVRQAKQWMKEGYRWVVDIDLEKFFDKVNHDRLMRKLSSRIQDPRVLQLIRRYLQTGVMERGLVSPNTEGTPQGGPLSPLLSNIVLDELDNELEKRGLKFVRYADDCNIYVRSKRAGLRIMESVTSFIENRLKLKVNREKSAVDRPWNRKFLGFSFTRGKDPKMRVSKESVKRLKQRIRELTSRRHSMKMSDRLRRLNRYLTGWLGYYQVVDTPSILAQIDAWIRRRLRMIRWKEWKTTSARQKNLVRLGIKKAKAWQWANSRKGYWRVAHSPIMDYALNSEYWKGQGLMSLAERYQTRRWTSGGSKRTADGSEFEPKKKRKV

SEQ ID NO: 970 - protein, 2131 aa, synthetic construct
MKRTADGSEFESPKKKRKVDKKYSIGLDIGTNSVGWAVITDEYKVPSKKFKVLGNTDRHSIKKNLIGALLFDSGETAEATRLKRTARRRYTRRKNRICYLQEIFSNEMAKVDDSFFHRLEESFLVEEDKKHERHPIFGNIVDEVAYHEKYPTIYHLRKKLVDSTDKADLRLIYLALAHMIKFRGHFLIEGDLNPDNSDVDKLFIQLVQTYNQLFEENPINASGVDAKAILSARLSKSRRLENLIAQLPGEKKNGLFGNLIALSLGLTPNFKSNFDLAEDAKLQLSKDTYDDDLDNLLAQIGDQYADLFLAAKNLSDAILLSDILRVNTEITKAPLSASMIKRYDEHHQDLTLLKALVRQQLPEKYKEIFFDQSKNGYAGYIDGGASQEEFYKFIKPILEKMDGTEELLVKLNREDLLRKQRTFDNGSIPHQIHLGELHAILRRQEDFYPFLKDNREKIEKILTFRIPYYVGPLARGNSRFAWMTRKSEETITPWNFEEVVDKGASAQSFIERMTNFDKNLPNEKVLPKHSLLYEYFTVYNELTKVKYVTEGMRKPAFLSGEQKKAIVDLLFKTNRKVTVKQLKEDYFKKIECFDSVEISGVEDRFNASLGTYHDLLKIIKDKDFLDNEENEDILEDIVLTLTLFEDREMIEERLKTYAHLFDDKVMKQLKRRRYTGWGRLSRKLINGIRDKQSGKTILDFLKSDGFANRNFMQLIHDDSLTFKEDIQKAQVSGQGDSLHEHIANLAGSPAIKKGILQTVKVVDELVKVMGRHKPENIVIEMARENQTTQKGQKNSRERMKRIEEGIKELGSQILKEHPVENTQLQNEKLYLYYLQNGRDMYVDQELDINRLSDYDVDAIVPQSFLKDDSIDNKVLTRSDKNRGKSDNVPSEEVVKKMKNYWRQLLNAKLITQRKFDNLTKAERGGLSELDKAGFIKRQLVETRQITKHVAQILDSRMNTKYDENDKLIREVKVITLKSKLVSDFRKDFQFYKVREINNYHHAHDAYLNAVVGTALIKKYPKLESEFVYGDYKVYDVRKMIAKSEQEIGKATAKYFFYSNIMNFFKTEITLANGEIRKRPLIETNGETGEIVWDKGRDFATVRKVLSMPQVNIVKKTEVQTGGFSKESILPKRNSDKLIARKKDWDPKKYGGFDSPTVAYSVLVVAKVEKGKSKKLKSVKELLGITIMERSSFEKNPIDFLEAKGYKEVKKDLIIKLPKYSLFELENGRKRMLASAGELQKGNELALPSKYVNFLYLASHYEKLKGSPEDNEQKQLFVEQHKHYLDEIIEQISEFSKRVILADANLDKVLSAYNKHRDKPIREQAENIIHLFTLTNLGAPAAFKYFDTTIDRKRYTSTKEVLDATLIHQSITGLYETRIDLSQLGGDSGGSSGGSSGSETPGTSESATPESSGGSSGGSSSLQLEEEYRLYQEREKPPEELQEWLLRFPQAWAETGGTGMARQAPPVVIELKSGATPIGVRQYPMSKEAREGIRPHIKRLLEQGILVPCRSPWNTPLLPVKKPGTNDYRPVQDLREVNKRVQDVHPTVPNPYNLLSTLPPTRTWYTVLDLKDAFFCLRLHPNSQPLFAFEWRDPESGRTGQLTWTRLPQGFKNSPTLFDEALHRDLAPFRANNPQVTLIIYIDDILLATETREDCELGTQKILAELGELGYRVSAKKAQLCRTEVTYLGYTLKNGQRWLTEARKRTVTQIPTPTTPRQVREFLGTAGFCRLWIPGFATLAAPLYPLTKEKGKFIWTKEHQVAFETLKKTLLQAPALALPDLSKPFTLYIDERKGVARGVLTQALGPWKRPVAYLSKKLDPVASGWPSCLRAIAATATLIKDADKLTLGQKVTVVAPHALENIIRQPPDRWITNARITHYQSLLLTERVTFAPPAVLNPATLLPEADETPVHQCEEILAEEAGTWSDLTDQPWPGAETWFTNGSSFVKKGKRRAGAAVVDRRTVIWASSLPEGTSAQKAELIALIQALKLAEGKSVNIYTDSRYAFATAHVHGAIYRQRGLLTSAGRDIKNKKEILDLLVAIHLPRKVAIIHCPGHQKGTGPIEKGNQMADQMAKEAAHGPMTLIAKVGSRQDERALEKRALTEEEGLEYLTSGGSKRTADGSEFEPKKKRKV

SEQ ID NO: 971 - protein, 2113 aa, synthetic construct
MKRTADGSEFESPKKKRKVDKKYSIGLDIGTNSVGWAVITDEYKVPSKKFKVLGNTDRHSIKKNLIGALLFDSGETAEATRLKRTARRRYTRRKNRICYLQEIFSNEMAKVDDSFFHRLEESFLVEEDKKHERHPIFGNIVDEVAYHEKYPTIYHLRKKLVDSTDKADLRLIYLALAHMIKFRGHFLIEGDLNPDNSDVDKLFIQLVQTYNQLFEENPINASGVDAKAILSARLSKSRRLENLIAQLPGEKKNGLFGNLIALSLGLTPNFKSNFDLAEDAKLQLSKDTYDDDLDNLLAQIGDQYADLFLAAKNLSDAILLSDILRVNTEITKAPLSASMIKRYDEHHQDLTLLKALVRQQLPEKYKEIFFDQSKNGYAGYIDGGASQEEFYKFIKPILEKMDGTEELLVKLNREDLLRKQRTFDNGSIPHQIHLGELHAILRRQEDFYPFLKDNREKIEKILTFRIPYYVGPLARGNSRFAWMTRKSEETITPWNFEEVVDKGASAQSFIERMTNFDKNLPNEKVLPKHSLLYEYFTVYNELTKVKYVTEGMRKPAFLSGEQKKAIVDLLFKTNRKVTVKQLKEDYFKKIECFDSVEISGVEDRFNASLGTYHDLLKIIKDKDFLDNEENEDILEDIVLTLTLFEDREMIEERLKTYAHLFDDKVMKQLKRRRYTGWGRLSRKLINGIRDKQSGKTILDFLKSDGFANRNFMQLIHDDSLTFKEDIQKAQVSGQGDSLHEHIANLAGSPAIKKGILQTVKVVDELVKVMGRHKPENIVIEMARENQTTQKGQKNSRERMKRIEEGIKELGSQILKEHPVENTQLQNEKLYLYYLQNGRDMYVDQELDINRLSDYDVDAIVPQSFLKDDSIDNKVLTRSDKNRGKSDNVPSEEVVKKMKNYWRQLLNAKLITQRKFDNLTKAERGGLSELDKAGFIKRQLVETRQITKHVAQILDSRMNTKYDENDKLIREVKVITLKSKLVSDFRKDFQFYKVREINNYHHAHDAYLNAVVGTALIKKYPKLESEFVYGDYKVYDVRKMIAKSEQEIGKATAKYFFYSNIMNFFKTEITLANGEIRKRPLIETNGETGEIVWDKGRDFATVRKVLSMPQVNIVKKTEVQTGGFSKESILPKRNSDKLIARKKDWDPKKYGGFDSPTVAYSVLVVAKVEKGKSKKLKSVKELLGITIMERSSFEKNPIDFLEAKGYKEVKKDLIIKLPKYSLFELENGRKRMLASAGELQKGNELALPSKYVNFLYLASHYEKLKGSPEDNEQKQLFVEQHKHYLDEIIEQISEFSKRVILADANLDKVLSAYNKHRDKPIREQAENIIHLFTLTNLGAPAAFKYFDTTIDRKRYTSTKEVLDATLIHQSITGLYETRIDLSQLGGDSGGSSGGSSGSETPGTSESATPESSGGSSGGSSVLNLEEEYRLHEKPVPSSIDPSWLQLFPTVWAERAGMGLANQVPPVVVELRSGASPVAVRQYPMSKEAREGIRPHIQRFLDLGVLVPCQSPWNTPLLPVKKPGTNDYRPVQDLREINKRVQDIHPTVPNPYNLLSSLPPSHTWYSVLDLKDAFFCLKLHPNSQPLFAFEWRDPEKGNTGQLTWTRLPQGFKNSPTLFDEALHRDLAPFRALNPQVVLLQYVDDLLVAAPTYRDCKEGTQKLLQELSKLGYRVSAKKAQLCQKEVTYLGYLLKEGKRWLTPARKATVMKIPPPTTPRQVREFLGTAGFCRLWIPGFASLAAPLYPLTKESIPFIWTEEHQKAFDRIKEALLSAPALALPDLTKPFTLYVDERAGVARGVLTQTLGPWRRPVAYLSKKLDPVASGWPTCLKAVAAVALLLKDADKLTLGQNVTVIASHSLESIVRQPPDRWMTNARMTHYQSLLLNERVSFAPPAVLNPATLLPVESEATPVHRCSEILAEETGTRRDLKDQPLPGVPAWYTDGSSFIAEGKRRAGAAIVDGKRTVWASSLPEGTSAQKAELVALTQALRLAEGKDINIYTDSRYAFATAHIHGAIYKQRGLLTSAGKDIKNKEEILALLEAIHLPKRVAIIHCPGHQKGNDPVATGNRRADEAAKQAALSTRVLAETTKPQELISGGSKRTADGSEFEPKKKRKV

SEQ ID NO: 972 - protein, 2044 aa, synthetic construct
MKRTADGSEFESPKKKRKVDKKYSIGLDIGTNSVGWAVITDEYKVPSKKFKVLGNTDRHSIKKNLIGALLFDSGETAEATRLKRTARRRYTRRKNRICYLQEIFSNEMAKVDDSFFHRLEESFLVEEDKKHERHPIFGNIVDEVAYHEKYPTIYHLRKKLVDSTDKADLRLIYLALAHMIKFRGHFLIEGDLNPDNSDVDKLFIQLVQTYNQLFEENPINASGVDAKAILSARLSKSRRLENLIAQLPGEKKNGLFGNLIALSLGLTPNFKSNFDLAEDAKLQLSKDTYDDDLDNLLAQIGDQYADLFLAAKNLSDAILLSDILRVNTEITKAPLSASMIKRYDEHHQDLTLLKALVRQQLPEKYKEIFFDQSKNGYAGYIDGGASQEEFYKFIKPILEKMDGTEELLVKLNREDLLRKQRTFDNGSIPHQIHLGELHAILRRQEDFYPFLKDNREKIEKILTFRIPYYVGPLARGNSRFAWMTRKSEETITPWNFEEVVDKGASAQSFIERMTNFDKNLPNEKVLPKHSLLYEYFTVYNELTKVKYVTEGMRKPAFLSGEQKKAIVDLLFKTNRKVTVKQLKEDYFKKIECFDSVEISGVEDRFNASLGTYHDLLKIIKDKDFLDNEENEDILEDIVLTLTLFEDREMIEERLKTYAHLFDDKVMKQLKRRRYTGWGRLSRKLINGIRDKQSGKTILDFLKSDGFANRNFMQLIHDDSLTFKEDIQKAQVSGQGDSLHEHIANLAGSPAIKKGILQTVKVVDELVKVMGRHKPENIVIEMARENQTTQKGQKNSRERMKRIEEGIKELGSQILKEHPVENTQLQNEKLYLYYLQNGRDMYVDQELDINRLSDYDVDAIVPQSFLKDDSIDNKVLTRSDKNRGKSDNVPSEEVVKKMKNYWRQLLNAKLITQRKFDNLTKAERGGLSELDKAGFIKRQLVETRQITKHVAQILDSRMNTKYDENDKLIREVKVITLKSKLVSDFRKDFQFYKVREINNYHHAHDAYLNAVVGTALIKKYPKLESEFVYGDYKVYDVRKMIAKSEQEIGKATAKYFFYSNIMNFFKTEITLANGEIRKRPLIETNGETGEIVWDKGRDFATVRKVLSMPQVNIVKKTEVQTGGFSKESILPKRNSDKLIARKKDWDPKKYGGFDSPTVAYSVLVVAKVEKGKSKKLKSVKELLGITIMERSSFEKNPIDFLEAKGYKEVKKDLIIKLPKYSLFELENGRKRMLASAGELQKGNELALPSKYVNFLYLASHYEKLKGSPEDNEQKQLFVEQHKHYLDEIIEQISEFSKRVILADANLDKVLSAYNKHRDKPIREQAENIIHLFTLTNLGAPAAFKYFDTTIDRKRYTSTKEVLDATLIHQSITGLYETRIDLSQLGGDSGGSSGGSSGSETPGTSESATPESSGGSSGGSSTLKLEDEYKLHDDPRPTPENIDQWLAKYPEAWAETNGMGLAKQQPPLVISLKASVTPANVKQYPMTIEAQQGIRPHIKRLLEQGILIPCQSAWNTPLLPVKKPGGTDYRPVQDLREVNKRVEDIHPTVPNPYNLLSTLPPSHAWYTVLDLKDAFFCLKLHPSSQPLFAFEWKDPELGLSGQLTWTRLPQGFKNSPTLFDGALHQDLAAFRTQYPHLIILQYVDDILLAAETKEECLEGTGALLQELGQLGYRASAKKAQLCKKEVTYLGYQLKEGQRWLTKARQQTILSIPAPKDRKQVREFLGTAGFCRLWIPGFAEMAAPLYPLTKASEGFTWENEHQRAFENIKQALLTAPALGLPDLNKPFELYVDEKTGYAKGVLTQKLGPWRRPVAYLSKKLDPVASGWPPCLRMVAALAVLVKDAFKLTLGQPLCIRAPHALESLIRQPPDRWLSNTRMTHYQALLLDTDRIQFGSPVALNPATLLPSTEEPDHHDCLQILAEVFGTRPDLKDQPLDNADYTWYTDGSSFLKGSQRRAGAAVTSKDKVIWAKPLPEGTSAQKAELIALTQALRLAEGKSLNVYTDSRYAFATAHIHGEIYRRRGLDLSGGSKRTADGSEFEPKKKRKV

SEQ ID NO: 973 - protein, 2165 aa, synthetic construct
MKRTADGSEFESPKKKRKVDKKYSIGLDIGTNSVGWAVITDEYKVPSKKFKVLGNTDRHSIKKNLIGALLFDSGETAEATRLKRTARRRYTRRKNRICYLQEIFSNEMAKVDDSFFHRLEESFLVEEDKKHERHPIFGNIVDEVAYHEKYPTIYHLRKKLVDSTDKADLRLIYLALAHMIKFRGHFLIEGDLNPDNSDVDKLFIQLVQTYNQLFEENPINASGVDAKAILSARLSKSRRLENLIAQLPGEKKNGLFGNLIALSLGLTPNFKSNFDLAEDAKLQLSKDTYDDDLDNLLAQIGDQYADLFLAAKNLSDAILLSDILRVNTEITKAPLSASMIKRYDEHHQDLTLLKALVRQQLPEKYKEIFFDQSKNGYAGYIDGGASQEEFYKFIKPILEKMDGTEELLVKLNREDLLRKQRTFDNGSIPHQIHLGELHAILRRQEDFYPFLKDNREKIEKILTFRIPYYVGPLARGNSRFAWMTRKSEETITPWNFEEVVDKGASAQSFIERMTNFDKNLPNEKVLPKHSLLYEYFTVYNELTKVKYVTEGMRKPAFLSGEQKKAIVDLLFKTNRKVTVKQLKEDYFKKIECFDSVEISGVEDRFNASLGTYHDLLKIIKDKDFLDNEENEDILEDIVLTLTLFEDREMIEERLKTYAHLFDDKVMKQLKRRRYTGWGRLSRKLINGIRDKQSGKTILDFLKSDGFANRNFMQLIHDDSLTFKEDIQKAQVSGQGDSLHEHIANLAGSPAIKKGILQTVKVVDELVKVMGRHKPENIVIEMARENQTTQKGQKNSRERMKRIEEGIKELGSQILKEHPVENTQLQNEKLYLYYLQNGRDMYVDQELDINRLSDYDVDAIVPQSFLKDDSIDNKVLTRSDKNRGKSDNVPSEEVVKKMKNYWRQLLNAKLITQRKFDNLTKAERGGLSELDKAGFIKRQLVETRQITKHVAQILDSRMNTKYDENDKLIREVKVITLKSKLVSDFRKDFQFYKVREINNYHHAHDAYLNAVVGTALIKKYPKLESEFVYGDYKVYDVRKMIAKSEQEIGKATAKYFFYSNIMNFFKTEITLANGEIRKRPLIETNGETGEIVWDKGRDFATVRKVLSMPQVNIVKKTEVQTGGFSKESILPKRNSDKLIARKKDWDPKKYGGFDSPTVAYSVLVVAKVEKGKSKKLKSVKELLGITIMERSSFEKNPIDFLEAKGYKEVKKDLIIKLPKYSLFELENGRKRMLASAGELQKGNELALPSKYVNFLYLASHYEKLKGSPEDNEQKQLFVEQHKHYLDEIIEQISEFSKRVILADANLDKVLSAYNKHRDKPIREQAENIIHLFTLTNLGAPAAFKYFDTTIDRKRYTSTKEVLDATLIHQSITGLYETRIDLSQLGGDSGGSSGGSSGSETPGTSESATPESSGGSSGGSSALSLEEEYRLFEAEPPEKSPEELQNWLREFPQAWAETAGLGLARDQPPLMISLKASATPVSIRQYPMSREAHEGIKPHIRRLLDQGVLKPCQSPWNTPLLPVKKPGTGDYRPVQDLREVNKRVEDIHPTVPNPYNLLSTLPPTHVWYTVLDLKDAFFCLRLHPQSQLLFAFEWRDPEKGSSGQLTWTRLPQGFKNSPTLFDEALHADLAGFRVEHPTLTLLQYMDDLLLVARSRTECMEGTRALLARLGQKGYRASAKKAQVCRDKVTYLGYTLSRGQRWLTGARKETIISIPPPRNPRQVREFLGTAGYCRLWIPGFAKLAAPLYPLTKPGTMFQWEEKHQKAFQQIKKALLEAPALGLPDLTKPFELFVDENSGFAKGVLVQRLGPWRRPVAYLSKKLDPVATGWPPCLRMVAAIAVLLKDAGKLTLGQPLTVLASHAVEALVRQPPDRWLSNARMTYYQALLLDSDRVNFGPIVSLNPATLLPLPSPSEEHDCLQILAEAHGTRPDLTDQPLKDPDAVWYTDGSSFLEEGERRAGAAITTESEVVWASSLPPGTSAQRAELIALTQALRMAEGKKLTVYTDSRYAFATAHVHGEIYRRRGLLTSAGKEIKNKKEILDLLKALFLPLQLSIVHCPGHQKDDSAVARGNRLADLTARTVASQPAGSSQLMAIQEPQPERDPVPYSPEDHELAKKMGSDWEQRRQAYILGDRMVMSTSHTRYMLRSGGSKRTADGSEFEPKKKRKV

SEQ ID NO: 974 - protein, 2119 aa, synthetic construct
MKRTADGSEFESPKKKRKVDKKYSIGLDIGTNSVGWAVITDEYKVPSKKFKVLGNTDRHSIKKNLIGALLFDSGETAEATRLKRTARRRYTRRKNRICYLQEIFSNEMAKVDDSFFHRLEESFLVEEDKKHERHPIFGNIVDEVAYHEKYPTIYHLRKKLVDSTDKADLRLIYLALAHMIKFRGHFLIEGDLNPDNSDVDKLFIQLVQTYNQLFEENPINASGVDAKAILSARLSKSRRLENLIAQLPGEKKNGLFGNLIALSLGLTPNFKSNFDLAEDAKLQLSKDTYDDDLDNLLAQIGDQYADLFLAAKNLSDAILLSDILRVNTEITKAPLSASMIKRYDEHHQDLTLLKALVRQQLPEKYKEIFFDQSKNGYAGYIDGGASQEEFYKFIKPILEKMDGTEELLVKLNREDLLRKQRTFDNGSIPHQIHLGELHAILRRQEDFYPFLKDNREKIEKILTFRIPYYVGPLARGNSRFAWMTRKSEETITPWNFEEVVDKGASAQSFIERMTNFDKNLPNEKVLPKHSLLYEYFTVYNELTKVKYVTEGMRKPAFLSGEQKKAIVDLLFKTNRKVTVKQLKEDYFKKIECFDSVEISGVEDRFNASLGTYHDLLKIIKDKDFLDNEENEDILEDIVLTLTLFEDREMIEERLKTYAHLFDDKVMKQLKRRRYTGWGRLSRKLINGIRDKQSGKTILDFLKSDGFANRNFMQLIHDDSLTFKEDIQKAQVSGQGDSLHEHIANLAGSPAIKKGILQTVKVVDELVKVMGRHKPENIVIEMARENQTTQKGQKNSRERMKRIEEGIKELGSQILKEHPVENTQLQNEKLYLYYLQNGRDMYVDQELDINRLSDYDVDAIVPQSFLKDDSIDNKVLTRSDKNRGKSDNVPSEEVVKKMKNYWRQLLNAKLITQRKFDNLTKAERGGLSELDKAGFIKRQLVETRQITKHVAQILDSRMNTKYDENDKLIREVKVITLKSKLVSDFRKDFQFYKVREINNYHHAHDAYLNAVVGTALIKKYPKLESEFVYGDYKVYDVRKMIAKSEQEIGKATAKYFFYSNIMNFFKTEITLANGEIRKRPLIETNGETGEIVWDKGRDFATVRKVLSMPQVNIVKKTEVQTGGFSKESILPKRNSDKLIARKKDWDPKKYGGFDSPTVAYSVLVVAKVEKGKSKKLKSVKELLGITIMERSSFEKNPIDFLEAKGYKEVKKDLIIKLPKYSLFELENGRKRMLASAGELQKGNELALPSKYVNFLYLASHYEKLKGSPEDNEQKQLFVEQHKHYLDEIIEQISEFSKRVILADANLDKVLSAYNKHRDKPIREQAENIIHLFTLTNLGAPAAFKYFDTTIDRKRYTSTKEVLDATLIHQSITGLYETRIDLSQLGGDSGGSSGGSSGSETPGTSESATPESSGGSSGGSSTAPLEEEYRLFLEAPIQNVTLLEQWKREIPKVWAEINPPGLASTQAPIHVQLLSTALPVRVRQYPITLEARRSLRETIRKFRAAGILRPVHSPWNTPLLPVRKPGTSEYRMVQDLREVNKRVETIHPTVPNPYTLLSLLPPDRTWYSVLDLKDAFFCIPLAPKSQLIFAFEWTDAEEGESGQLTWTRLPQGFKNSPTLFDEALNRDLQGFRLDHPSVSLLQYVDDLLIAADTQAACLSATRDLLMTLAELGYRVSGKKAQLCQEEVTYLGFKIHKGSRTLSNSRTQAILQIPVPKTKRQVREFLGTIGYCRLWIPGFAELAQPLYAATRGGNDPLEWGEKEEEAFQSLKLALTQPPALALPSLDKPFQLFIEETGGAAKGVLTQALGPWKRPVAYLSKRLDPVAAGWPRCLRAIAAAALLTREASKLTFGQDIEITSSHNLESLLRSPPDRWLTNARITQYQVLLLDPPRVRFKQTAALNPATLLPETDDTLPIHHCLDTLDSLTSTRPDLTDQPLAQAEATLFTDGSSYIPHGKRYAGAAVVTLDSVIWAEPLPIGTSAQKAELIALTKALEWSKDKSVNIYTDSRYAFATLHVHGMIYKERGLLTAGGKAIKNAPEILALLTAVWLPKRVAVMHCRGHQKDDAPTSAGNRRADEVAREVAIRPLSIQATVFDAPDMPSGGSKRTADGSEFEPKKKRKV

SEQ ID NO: 975 - protein, 2120 aa, synthetic construct
MKRTADGSEFESPKKKRKVDKKYSIGLDIGTNSVGWAVITDEYKVPSKKFKVLGNTDRHSIKKNLIGALLFDSGETAEATRLKRTARRRYTRRKNRICYLQEIFSNEMAKVDDSFFHRLEESFLVEEDKKHERHPIFGNIVDEVAYHEKYPTIYHLRKKLVDSTDKADLRLIYLALAHMIKFRGHFLIEGDLNPDNSDVDKLFIQLVQTYNQLFEENPINASGVDAKAILSARLSKSRRLENLIAQLPGEKKNGLFGNLIALSLGLTPNFKSNFDLAEDAKLQLSKDTYDDDLDNLLAQIGDQYADLFLAAKNLSDAILLSDILRVNTEITKAPLSASMIKRYDEHHQDLTLLKALVRQQLPEKYKEIFFDQSKNGYAGYIDGGASQEEFYKFIKPILEKMDGTEELLVKLNREDLLRKQRTFDNGSIPHQIHLGELHAILRRQEDFYPFLKDNREKIEKILTFRIPYYVGPLARGNSRFAWMTRKSEETITPWNFEEVVDKGASAQSFIERMTNFDKNLPNEKVLPKHSLLYEYFTVYNELTKVKYVTEGMRKPAFLSGEQKKAIVDLLFKTNRKVTVKQLKEDYFKKIECFDSVEISGVEDRFNASLGTYHDLLKIIKDKDFLDNEENEDILEDIVLTLTLFEDREMIEERLKTYAHLFDDKVMKQLKRRRYTGWGRLSRKLINGIRDKQSGKTILDFLKSDGFANRNFMQLIHDDSLTFKEDIQKAQVSGQGDSLHEHIANLAGSPAIKKGILQTVKVVDELVKVMGRHKPENIVIEMARENQTTQKGQKNSRERMKRIEEGIKELGSQILKEHPVENTQLQNEKLYLYYLQNGRDMYVDQELDINRLSDYDVDAIVPQSFLKDDSIDNKVLTRSDKNRGKSDNVPSEEVVKKMKNYWRQLLNAKLITQRKFDNLTKAERGGLSELDKAGFIKRQLVETRQITKHVAQILDSRMNTKYDENDKLIREVKVITLKSKLVSDFRKDFQFYKVREINNYHHAHDAYLNAVVGTALIKKYPKLESEFVYGDYKVYDVRKMIAKSEQEIGKATAKYFFYSNIMNFFKTEITLANGEIRKRPLIETNGETGEIVWDKGRDFATVRKVLSMPQVNIVKKTEVQTGGFSKESILPKRNSDKLIARKKDWDPKKYGGFDSPTVAYSVLVVAKVEKGKSKKLKSVKELLGITIMERSSFEKNPIDFLEAKGYKEVKKDLIIKLPKYSLFELENGRKRMLASAGELQKGNELALPSKYVNFLYLASHYEKLKGSPEDNEQKQLFVEQHKHYLDEIIEQISEFSKRVILADANLDKVLSAYNKHRDKPIREQAENIIHLFTLTNLGAPAAFKYFDTTIDRKRYTSTKEVLDATLIHQSITGLYETRIDLSQLGGDSGGSSGGSSGSETPGTSESATPESSGGSSGGSSTCPLSEESRLLPLTFSPDRPSTTSTPTSLTLLNHFKGLVPGVWAETNPFGLAGHQPPVVVQLSSTATPACVQQYPLTRAALLGIKPHIDRLLAAGILRPCQSSWNTPLLPVRKPGSGDFRPVQDLREVNARVETVHPTVPNPYTLLSSLDPARTWYTVLDLKDAFFSIPLAPVSQPIFAFTWTDPNTGTSSQLTWTRLPQGFKNSPTLFGSALASDLAAFRVSYPEVTLLQYVDDLLLATSSEAICKDATLHLLQLLEASGYRISGKKAQLCSQSVVYLGFTLRSGQRLLSRGRVAAILGMPAPRNRRGLREFLGMAGYCRLWILGFAEVAKPLYEALTGEPTQFVWGPRQQEAFDKLRKALSSTPALSLPDLSKPFRLYVSESRAVAKGVLTQPLGPWNRPVAYLSKQLDPVASGWPSCLRTVAAIAVLVREAAKLTFGQPLEISASHHLEQLLHSPPTRWISNSRLTHYQSLLLDSARISFAPPVTLNPATLLPDSPPSSPIHDCLDTLDSIHTSRPGLTDVPLTNPDLVLFTDGSSFVQEGIRRAGAAVVTPVETLWDTALPPGTSAQRAELIALTQALRLSAGRRVNIYTDSRYAFATVHIHGYVYLQRGLLTSAGREIRNKSQIQDLLDAVWLPKEVAVIHVPAHTRGTDPQSLGNAAADKAARAAACKPLIPAMSGGSKRTADGSEFEPKKKRKV

SEQ ID NO: 976 - protein, 2111 aa, synthetic construct
MKRTADGSEFESPKKKRKVDKKYSIGLDIGTNSVGWAVITDEYKVPSKKFKVLGNTDRHSIKKNLIGALLFDSGETAEATRLKRTARRRYTRRKNRICYLQEIFSNEMAKVDDSFFHRLEESFLVEEDKKHERHPIFGNIVDEVAYHEKYPTIYHLRKKLVDSTDKADLRLIYLALAHMIKFRGHFLIEGDLNPDNSDVDKLFIQLVQTYNQLFEENPINASGVDAKAILSARLSKSRRLENLIAQLPGEKKNGLFGNLIALSLGLTPNFKSNFDLAEDAKLQLSKDTYDDDLDNLLAQIGDQYADLFLAAKNLSDAILLSDILRVNTEITKAPLSASMIKRYDEHHQDLTLLKALVRQQLPEKYKEIFFDQSKNGYAGYIDGGASQEEFYKFIKPILEKMDGTEELLVKLNREDLLRKQRTFDNGSIPHQIHLGELHAILRRQEDFYPFLKDNREKIEKILTFRIPYYVGPLARGNSRFAWMTRKSEETITPWNFEEVVDKGASAQSFIERMTNFDKNLPNEKVLPKHSLLYEYFTVYNELTKVKYVTEGMRKPAFLSGEQKKAIVDLLFKTNRKVTVKQLKEDYFKKIECFDSVEISGVEDRFNASLGTYHDLLKIIKDKDFLDNEENEDILEDIVLTLTLFEDREMIEERLKTYAHLFDDKVMKQLKRRRYTGWGRLSRKLINGIRDKQSGKTILDFLKSDGFANRNFMQLIHDDSLTFKEDIQKAQVSGQGDSLHEHIANLAGSPAIKKGILQTVKVVDELVKVMGRHKPENIVIEMARENQTTQKGQKNSRERMKRIEEGIKELGSQILKEHPVENTQLQNEKLYLYYLQNGRDMYVDQELDINRLSDYDVDAIVPQSFLKDDSIDNKVLTRSDKNRGKSDNVPSEEVVKKMKNYWRQLLNAKLITQRKFDNLTKAERGGLSELDKAGFIKRQLVETRQITKHVAQILDSRMNTKYDENDKLIREVKVITLKSKLVSDFRKDFQFYKVREINNYHHAHDAYLNAVVGTALIKKYPKLESEFVYGDYKVYDVRKMIAKSEQEIGKATAKYFFYSNIMNFFKTEITLANGEIRKRPLIETNGETGEIVWDKGRDFATVRKVLSMPQVNIVKKTEVQTGGFSKESILPKRNSDKLIARKKDWDPKKYGGFDSPTVAYSVLVVAKVEKGKSKKLKSVKELLGITIMERSSFEKNPIDFLEAKGYKEVKKDLIIKLPKYSLFELENGRKRMLASAGELQKGNELALPSKYVNFLYLASHYEKLKGSPEDNEQKQLFVEQHKHYLDEIIEQISEFSKRVILADANLDKVLSAYNKHRDKPIREQAENIIHLFTLTNLGAPAAFKYFDTTIDRKRYTSTKEVLDATLIHQSITGLYETRIDLSQLGGDSGGSSGGSSGSETPGTSESATPESSGGSSGGSSTTLVPLQEYQERLLKQTALPNKEKTMLQSLFLRYDALWQHWENQVGHRRIKPHHIATGTVPPRPQKQYPINPKAKPSIQVVINDLLKQGVLVQQNSTMNTPIYPVPKPDGKWRMVLDYREVNKTIPLIAAQNQHSAGILSSIFRGKYKTTLDLSNGFWAHPITPESYWLTAFTWQGQQYCWTRLPQGFLNSPALFTADVVDLLKEIPNVQAYVDDIYISHDDPVEHVQQLEKVFSLLLNAGYVVSLKKSEIAKHEVEFLGFNITKEGRGLTDTFKQKLLNITPPKDLKQLQSILGLLNFARNFIANFSELVRPLYNIVSSANGKYITWTQENSQQLQNIISTLNSAKNLQERNPEVRLVMKVNTSPSAGYIRFYNEATKQPIMYLNYVYSKAETKFTMTEKLLTTIHKGLIKALDLAMGQEILVYSPIVSMTKIQKTPLPERKALPIRWITWMSYLEDPRIQFYYDKTLPELLQVPKVTEDEIAKTKHPSEFNMVFYTDGSAIKHPNIKKSHSAGMGIAQVQFKPDFTIVNTWSIPLGDHTAQMAEIAAVEFACKKALKITGPVLVVTDSFYVAESANKELPYWQSNGFVNNKKKPLKHVSKWKSIAECLQLKPDIVIMHEKGHQPSNTTFHTEGNNLADKLATQGSYVVNTNTTPSLDAELDQLLQGHTPSGGSKRTADGSEFEPKKKRKV

SEQ ID NO: 977 - protein, 2111 aa, synthetic construct
MKRTADGSEFESPKKKRKVDKKYSIGLDIGTNSVGWAVITDEYKVPSKKFKVLGNTDRHSIKKNLIGALLFDSGETAEATRLKRTARRRYTRRKNRICYLQEIFSNEMAKVDDSFFHRLEESFLVEEDKKHERHPIFGNIVDEVAYHEKYPTIYHLRKKLVDSTDKADLRLIYLALAHMIKFRGHFLIEGDLNPDNSDVDKLFIQLVQTYNQLFEENPINASGVDAKAILSARLSKSRRLENLIAQLPGEKKNGLFGNLIALSLGLTPNFKSNFDLAEDAKLQLSKDTYDDDLDNLLAQIGDQYADLFLAAKNLSDAILLSDILRVNTEITKAPLSASMIKRYDEHHQDLTLLKALVRQQLPEKYKEIFFDQSKNGYAGYIDGGASQEEFYKFIKPILEKMDGTEELLVKLNREDLLRKQRTFDNGSIPHQIHLGELHAILRRQEDFYPFLKDNREKIEKILTFRIPYYVGPLARGNSRFAWMTRKSEETITPWNFEEVVDKGASAQSFIERMTNFDKNLPNEKVLPKHSLLYEYFTVYNELTKVKYVTEGMRKPAFLSGEQKKAIVDLLFKTNRKVTVKQLKEDYFKKIECFDSVEISGVEDRFNASLGTYHDLLKIIKDKDFLDNEENEDILEDIVLTLTLFEDREMIEERLKTYAHLFDDKVMKQLKRRRYTGWGRLSRKLINGIRDKQSGKTILDFLKSDGFANRNFMQLIHDDSLTFKEDIQKAQVSGQGDSLHEHIANLAGSPAIKKGILQTVKVVDELVKVMGRHKPENIVIEMARENQTTQKGQKNSRERMKRIEEGIKELGSQILKEHPVENTQLQNEKLYLYYLQNGRDMYVDQELDINRLSDYDVDAIVPQSFLKDDSIDNKVLTRSDKNRGKSDNVPSEEVVKKMKNYWRQLLNAKLITQRKFDNLTKAERGGLSELDKAGFIKRQLVETRQITKHVAQILDSRMNTKYDENDKLIREVKVITLKSKLVSDFRKDFQFYKVREINNYHHAHDAYLNAVVGTALIKKYPKLESEFVYGDYKVYDVRKMIAKSEQEIGKATAKYFFYSNIMNFFKTEITLANGEIRKRPLIETNGETGEIVWDKGRDFATVRKVLSMPQVNIVKKTEVQTGGFSKESILPKRNSDKLIARKKDWDPKKYGGFDSPTVAYSVLVVAKVEKGKSKKLKSVKELLGITIMERSSFEKNPIDFLEAKGYKEVKKDLIIKLPKYSLFELENGRKRMLASAGELQKGNELALPSKYVNFLYLASHYEKLKGSPEDNEQKQLFVEQHKHYLDEIIEQISEFSKRVILADANLDKVLSAYNKHRDKPIREQAENIIHLFTLTNLGAPAAFKYFDTTIDRKRYTSTKEVLDATLIHQSITGLYETRIDLSQLGGDSGGSSGGSSGSETPGTSESATPESSGGSSGGSSTVLVPLHEYQERLLQQTALPKEQKELLQKLFLKYDALWQHWENQVGHRRIKPHNIATGTLAPRPQKQYPINPKAKPSIQIVIDDLLKQGVLIQQNSTMNTPVYPVPKPDGKWRMVLDYREVNKTIPLIAAQNQHSAGILSSIYRGKYKTTLDLTNGFWAHPITPESYWLTAFTWQGKQYCWTRLPQGFLNSPALFTADVVDLLKEIPNVQAYVDDIYISHDDPQEHLEQLEKIFSILLNAGYVVSLKKSEIAQREVEFLGFNITKEGRGLTDTFKQKLLNITPPKDLKQLQSILGLLNFARNFIPNYSELVKPLYTIVANANGKFISWTEDNSNQLQHIISVLNQADNLEERNPETRLIIKVNSSPSAGYIRYYNEGSKRPIMYVNYIFSKAEAKFTQTEKLLTTMHKGLIKAMDLAMGQEILVYSPIVSMTKIQRTPLPERKALPVRWITWMTYLEDPRIQFHYDKSLPELQQIPNVTEDVIAKTKHPSEFAMVFYTDGSAIKHPDVNKSHSAGMGIAQVQFIPEYKIVHQWSIPLGDHTAQLAEIAAVEFACKKALKISGPVLIVTDSFYVAESANKELPYWKSNGFLNNKKKPLRHVSKWKSIAECLQLKPDIIIMHEKGHQQPMTTLHTEGNNLADKLATQGSYVVHCNTTPSLDAELDQLLQGHYPSGGSKRTADGSEFEPKKKRKV

SEQ ID NO: 978 - protein, 2105 aa, synthetic construct
MKRTADGSEFESPKKKRKVDKKYSIGLDIGTNSVGWAVITDEYKVPSKKFKVLGNTDRHSIKKNLIGALLFDSGETAEATRLKRTARRRYTRRKNRICYLQEIFSNEMAKVDDSFFHRLEESFLVEEDKKHERHPIFGNIVDEVAYHEKYPTIYHLRKKLVDSTDKADLRLIYLALAHMIKFRGHFLIEGDLNPDNSDVDKLFIQLVQTYNQLFEENPINASGVDAKAILSARLSKSRRLENLIAQLPGEKKNGLFGNLIALSLGLTPNFKSNFDLAEDAKLQLSKDTYDDDLDNLLAQIGDQYADLFLAAKNLSDAILLSDILRVNTEITKAPLSASMIKRYDEHHQDLTLLKALVRQQLPEKYKEIFFDQSKNGYAGYIDGGASQEEFYKFIKPILEKMDGTEELLVKLNREDLLRKQRTFDNGSIPHQIHLGELHAILRRQEDFYPFLKDNREKIEKILTFRIPYYVGPLARGNSRFAWMTRKSEETITPWNFEEVVDKGASAQSFIERMTNFDKNLPNEKVLPKHSLLYEYFTVYNELTKVKYVTEGMRKPAFLSGEQKKAIVDLLFKTNRKVTVKQLKEDYFKKIECFDSVEISGVEDRFNASLGTYHDLLKIIKDKDFLDNEENEDILEDIVLTLTLFEDREMIEERLKTYAHLFDDKVMKQLKRRRYTGWGRLSRKLINGIRDKQSGKTILDFLKSDGFANRNFMQLIHDDSLTFKEDIQKAQVSGQGDSLHEHIANLAGSPAIKKGILQTVKVVDELVKVMGRHKPENIVIEMARENQTTQKGQKNSRERMKRIEEGIKELGSQILKEHPVENTQLQNEKLYLYYLQNGRDMYVDQELDINRLSDYDVDAIVPQSFLKDDSIDNKVLTRSDKNRGKSDNVPSEEVVKKMKNYWRQLLNAKLITQRKFDNLTKAERGGLSELDKAGFIKRQLVETRQITKHVAQILDSRMNTKYDENDKLIREVKVITLKSKLVSDFRKDFQFYKVREINNYHHAHDAYLNAVVGTALIKKYPKLESEFVYGDYKVYDVRKMIAKSEQEIGKATAKYFFYSNIMNFFKTEITLANGEIRKRPLIETNGETGEIVWDKGRDFATVRKVLSMPQVNIVKKTEVQTGGFSKESILPKRNSDKLIARKKDWDPKKYGGFDSPTVAYSVLVVAKVEKGKSKKLKSVKELLGITIMERSSFEKNPIDFLEAKGYKEVKKDLIIKLPKYSLFELENGRKRMLASAGELQKGNELALPSKYVNFLYLASHYEKLKGSPEDNEQKQLFVEQHKHYLDEIIEQISEFSKRVILADANLDKVLSAYNKHRDKPIREQAENIIHLFTLTNLGAPAAFKYFDTTIDRKRYTSTKEVLDATLIHQSITGLYETRIDLSQLGGDSGGSSGGSSGSETPGTSESATPESSGGSSGGSSTVLLPPTYHKQLSCQTKNTLNIDEYLLQFPDQLWASLPTDIGRMLVPPITIKIKDNASLPSIRQYPLPKDKTEGLRPLISSLENQGILIKCHSPCNTPIFPIKKAGRDEYRMIHDLRAINNIVAPLTAVVASPTTVLSNLAPSLHWFTVIDLSNAFFSVPIHKDSQYLFAFTFEGHQYTWTVLPQGFIHSPTLFSQALYQSLHKIKFKISSEICIYMDDVLIASKDRDTNLKDTAVMLQHLASEGHKVSKKKLQLCQQEVVYLGQLLTPEGRKILPDRKVTVSQFQQPTTIRQIRAFLGLVGYCRHWIPEFSIHSKFLEKQLKKDTAEPFQLDDQQVEAFNKLKHAITTAPVLVVPDPAKPFQLYTSHSEHASIAVLTQKHAGRTRPIAFLSSKFDAIESGLPPCLKACASIHRSLTQADSFILGAPLIIYTTHAICTLLQRDRSQLVTASRFSKWEADLLRPELTFVACSAVSPAHLYMQSCENNIPPHDCVLLTHTISRPRPDLSDLPIPDPDMTLFSDGSYTTGRGGAAVVMHRPVTDDFIIIHQQPGGASAQTAELLALAAACHLATDKTVNIYTDSRYAYGVVHDFGHLWMHRGFVTSAGTPIKNHKEIEYLLKQIMKPKQVSVIKIEAHTKGVSMEVRGNAAADEAAKNAVFLVQRVLKSGGSKRTADGSEFEPKKKRKV

SEQ ID NO: 979 - protein, 1691 aa, synthetic construct
MKRTADGSEFESPKKKRKVDKKYSIGLDIGTNSVGWAVITDEYKVPSKKFKVLGNTDRHSIKKNLIGALLFDSGETAEATRLKRTARRRYTRRKNRICYLQEIFSNEMAKVDDSFFHRLEESFLVEEDKKHERHPIFGNIVDEVAYHEKYPTIYHLRKKLVDSTDKADLRLIYLALAHMIKFRGHFLIEGDLNPDNSDVDKLFIQLVQTYNQLFEENPINASGVDAKAILSARLSKSRRLENLIAQLPGEKKNGLFGNLIALSLGLTPNFKSNFDLAEDAKLQLSKDTYDDDLDNLLAQIGDQYADLFLAAKNLSDAILLSDILRVNTEITKAPLSASMIKRYDEHHQDLTLLKALVRQQLPEKYKEIFFDQSKNGYAGYIDGGASQEEFYKFIKPILEKMDGTEELLVKLNREDLLRKQRTFDNGSIPHQIHLGELHAILRRQEDFYPFLKDNREKIEKILTFRIPYYVGPLARGNSRFAWMTRKSEETITPWNFEEVVDKGASAQSFIERMTNFDKNLPNEKVLPKHSLLYEYFTVYNELTKVKYVTEGMRKPAFLSGEQKKAIVDLLFKTNRKVTVKQLKEDYFKKIECFDSVEISGVEDRFNASLGTYHDLLKIIKDKDFLDNEENEDILEDIVLTLTLFEDREMIEERLKTYAHLFDDKVMKQLKRRRYTGWGRLSRKLINGIRDKQSGKTILDFLKSDGFANRNFMQLIHDDSLTFKEDIQKAQVSGQGDSLHEHIANLAGSPAIKKGILQTVKVVDELVKVMGRHKPENIVIEMARENQTTQKGQKNSRERMKRIEEGIKELGSQILKEHPVENTQLQNEKLYLYYLQNGRDMYVDQELDINRLSDYDVDAIVPQSFLKDDSIDNKVLTRSDKNRGKSDNVPSEEVVKKMKNYWRQLLNAKLITQRKFDNLTKAERGGLSELDKAGFIKRQLVETRQITKHVAQILDSRMNTKYDENDKLIREVKVITLKSKLVSDFRKDFQFYKVREINNYHHAHDAYLNAVVGTALIKKYPKLESEFVYGDYKVYDVRKMIAKSEQEIGKATAKYFFYSNIMNFFKTEITLANGEIRKRPLIETNGETGEIVWDKGRDFATVRKVLSMPQVNIVKKTEVQTGGFSKESILPKRNSDKLIARKKDWDPKKYGGFDSPTVAYSVLVVAKVEKGKSKKLKSVKELLGITIMERSSFEKNPIDFLEAKGYKEVKKDLIIKLPKYSLFELENGRKRMLASAGELQKGNELALPSKYVNFLYLASHYEKLKGSPEDNEQKQLFVEQHKHYLDEIIEQISEFSKRVILADANLDKVLSAYNKHRDKPIREQAENIIHLFTLTNLGAPAAFKYFDTTIDRKRYTSTKEVLDATLIHQSITGLYETRIDLSQLGGDSGGSSGGSSGSETPGTSESATPESSGGSSGGSSDKWIHKFEIKEGRWVYVPSEKTREIGGKIHFYIKHKWNYPLYMYHLRKGGHVAAANRHIKKQYFSLIDISDFFGSTSQSRVTRELGKLIPYAKAREIAKLSTVRSPPSNGLKHVIPYGYPQSPILATLCFHQSFCGKLINIISKSGQISVSIYMDDILLSSDDLSQLEIAFNSVKAALAKSGYCINERKTQSPSTMVKVFNLELSQQSLRVSPKRIVEFLQAYISSKNAAERKGIASYVGSVNKSQSTIFKSGGSKRTADGSEFEPKKKRKV

SEQ ID NO: 980 - protein, 1689 aa, synthetic construct
MKRTADGSEFESPKKKRKVDKKYSIGLDIGTNSVGWAVITDEYKVPSKKFKVLGNTDRHSIKKNLIGALLFDSGETAEATRLKRTARRRYTRRKNRICYLQEIFSNEMAKVDDSFFHRLEESFLVEEDKKHERHPIFGNIVDEVAYHEKYPTIYHLRKKLVDSTDKADLRLIYLALAHMIKFRGHFLIEGDLNPDNSDVDKLFIQLVQTYNQLFEENPINASGVDAKAILSARLSKSRRLENLIAQLPGEKKNGLFGNLIALSLGLTPNFKSNFDLAEDAKLQLSKDTYDDDLDNLLAQIGDQYADLFLAAKNLSDAILLSDILRVNTEITKAPLSASMIKRYDEHHQDLTLLKALVRQQLPEKYKEIFFDQSKNGYAGYIDGGASQEEFYKFIKPILEKMDGTEELLVKLNREDLLRKQRTFDNGSIPHQIHLGELHAILRRQEDFYPFLKDNREKIEKILTFRIPYYVGPLARGNSRFAWMTRKSEETITPWNFEEVVDKGASAQSFIERMTNFDKNLPNEKVLPKHSLLYEYFTVYNELTKVKYVTEGMRKPAFLSGEQKKAIVDLLFKTNRKVTVKQLKEDYFKKIECFDSVEISGVEDRFNASLGTYHDLLKIIKDKDFLDNEENEDILEDIVLTLTLFEDREMIEERLKTYAHLFDDKVMKQLKRRRYTGWGRLSRKLINGIRDKQSGKTILDFLKSDGFANRNFMQLIHDDSLTFKEDIQKAQVSGQGDSLHEHIANLAGSPAIKKGILQTVKVVDELVKVMGRHKPENIVIEMARENQTTQKGQKNSRERMKRIEEGIKELGSQILKEHPVENTQLQNEKLYLYYLQNGRDMYVDQELDINRLSDYDVDAIVPQSFLKDDSIDNKVLTRSDKNRGKSDNVPSEEVVKKMKNYWRQLLNAKLITQRKFDNLTKAERGGLSELDKAGFIKRQLVETRQITKHVAQILDSRMNTKYDENDKLIREVKVITLKSKLVSDFRKDFQFYKVREINNYHHAHDAYLNAVVGTALIKKYPKLESEFVYGDYKVYDVRKMIAKSEQEIGKATAKYFFYSNIMNFFKTEITLANGEIRKRPLIETNGETGEIVWDKGRDFATVRKVLSMPQVNIVKKTEVQTGGFSKESILPKRNSDKLIARKKDWDPKKYGGFDSPTVAYSVLVVAKVEKGKSKKLKSVKELLGITIMERSSFEKNPIDFLEAKGYKEVKKDLIIKLPKYSLFELENGRKRMLASAGELQKGNELALPSKYVNFLYLASHYEKLKGSPEDNEQKQLFVEQHKHYLDEIIEQISEFSKRVILADANLDKVLSAYNKHRDKPIREQAENIIHLFTLTNLGAPAAFKYFDTTIDRKRYTSTKEVLDATLIHQSITGLYETRIDLSQLGGDSGGSSGGSSGSETPGTSESATPESSGGSSGGSSKRWEHRFQVKSGRWVFVPTPASRAVGEQIRARVAKAWSPPAFYYHLRKGGHVAALRAHADSTYFFRCDLKNFFGSINLSRVTRCLKRYFSYVEARGMASASVVIAPGATKTMLPYGFVQSPLLASLALDQSRAGAYLRKLSAQEGITVSVYMDDIVVSSLEIGLLDKIKAELGEKAEKAGISLNQEKTEGPSTLVTVFNVELSHNSLVISEERMAEFREALMIASCDAVAMGILGYVASVNDAQLSKLYSGGSKRTADGSEFEPKKKRKV

SEQ ID NO: 981 - protein, 1695 aa, synthetic construct
MKRTADGSEFESPKKKRKVDKKYSIGLDIGTNSVGWAVITDEYKVPSKKFKVLGNTDRHSIKKNLIGALLFDSGETAEATRLKRTARRRYTRRKNRICYLQEIFSNEMAKVDDSFFHRLEESFLVEEDKKHERHPIFGNIVDEVAYHEKYPTIYHLRKKLVDSTDKADLRLIYLALAHMIKFRGHFLIEGDLNPDNSDVDKLFIQLVQTYNQLFEENPINASGVDAKAILSARLSKSRRLENLIAQLPGEKKNGLFGNLIALSLGLTPNFKSNFDLAEDAKLQLSKDTYDDDLDNLLAQIGDQYADLFLAAKNLSDAILLSDILRVNTEITKAPLSASMIKRYDEHHQDLTLLKALVRQQLPEKYKEIFFDQSKNGYAGYIDGGASQEEFYKFIKPILEKMDGTEELLVKLNREDLLRKQRTFDNGSIPHQIHLGELHAILRRQEDFYPFLKDNREKIEKILTFRIPYYVGPLARGNSRFAWMTRKSEETITPWNFEEVVDKGASAQSFIERMTNFDKNLPNEKVLPKHSLLYEYFTVYNELTKVKYVTEGMRKPAFLSGEQKKAIVDLLFKTNRKVTVKQLKEDYFKKIECFDSVEISGVEDRFNASLGTYHDLLKIIKDKDFLDNEENEDILEDIVLTLTLFEDREMIEERLKTYAHLFDDKVMKQLKRRRYTGWGRLSRKLINGIRDKQSGKTILDFLKSDGFANRNFMQLIHDDSLTFKEDIQKAQVSGQGDSLHEHIANLAGSPAIKKGILQTVKVVDELVKVMGRHKPENIVIEMARENQTTQKGQKNSRERMKRIEEGIKELGSQILKEHPVENTQLQNEKLYLYYLQNGRDMYVDQELDINRLSDYDVDAIVPQSFLKDDSIDNKVLTRSDKNRGKSDNVPSEEVVKKMKNYWRQLLNAKLITQRKFDNLTKAERGGLSELDKAGFIKRQLVETRQITKHVAQILDSRMNTKYDENDKLIREVKVITLKSKLVSDFRKDFQFYKVREINNYHHAHDAYLNAVVGTALIKKYPKLESEFVYGDYKVYDVRKMIAKSEQEIGKATAKYFFYSNIMNFFKTEITLANGEIRKRPLIETNGETGEIVWDKGRDFATVRKVLSMPQVNIVKKTEVQTGGFSKESILPKRNSDKLIARKKDWDPKKYGGFDSPTVAYSVLVVAKVEKGKSKKLKSVKELLGITIMERSSFEKNPIDFLEAKGYKEVKKDLIIKLPKYSLFELENGRKRMLASAGELQKGNELALPSKYVNFLYLASHYEKLKGSPEDNEQKQLFVEQHKHYLDEIIEQISEFSKRVILADANLDKVLSAYNKHRDKPIREQAENIIHLFTLTNLGAPAAFKYFDTTIDRKRYTSTKEVLDATLIHQSITGLYETRIDLSQLGGDSGGSSGGSSGSETPGTSESATPESSGGSSGGSSSNMAPRWINKFEIKPNVWVYEPSEACREEGAEILRFINRKWKIPTYYYHLRRGGHVEALRVHIENDWFVSLDIKEFFQSTSRSRVTRTLRNFLPYEKARIIAKVSTVSNFTNDKFSHFIPFGYVQSPLLATICLHYSSFGQLIKELSRCEDVKLSVYMDDIILSSSSLELLERTKTLLEESASRSHYKLNTLKVQGPAERITAFNIDLSHQSMVISPKRLLSFLVDFNSPDSDNLKREGIRSYIYSVNSEQAEYFSGGSKRTADGSEFEPKKKRKV

SEQ ID NO: 982 - protein, 1695 aa, synthetic construct
MKRTADGSEFESPKKKRKVDKKYSIGLDIGTNSVGWAVITDEYKVPSKKFKVLGNTDRHSIKKNLIGALLFDSGETAEATRLKRTARRRYTRRKNRICYLQEIFSNEMAKVDDSFFHRLEESFLVEEDKKHERHPIFGNIVDEVAYHEKYPTIYHLRKKLVDSTDKADLRLIYLALAHMIKFRGHFLIEGDLNPDNSDVDKLFIQLVQTYNQLFEENPINASGVDAKAILSARLSKSRRLENLIAQLPGEKKNGLFGNLIALSLGLTPNFKSNFDLAEDAKLQLSKDTYDDDLDNLLAQIGDQYADLFLAAKNLSDAILLSDILRVNTEITKAPLSASMIKRYDEHHQDLTLLKALVRQQLPEKYKEIFFDQSKNGYAGYIDGGASQEEFYKFIKPILEKMDGTEELLVKLNREDLLRKQRTFDNGSIPHQIHLGELHAILRRQEDFYPFLKDNREKIEKILTFRIPYYVGPLARGNSRFAWMTRKSEETITPWNFEEVVDKGASAQSFIERMTNFDKNLPNEKVLPKHSLLYEYFTVYNELTKVKYVTEGMRKPAFLSGEQKKAIVDLLFKTNRKVTVKQLKEDYFKKIECFDSVEISGVEDRFNASLGTYHDLLKIIKDKDFLDNEENEDILEDIVLTLTLFEDREMIEERLKTYAHLFDDKVMKQLKRRRYTGWGRLSRKLINGIRDKQSGKTILDFLKSDGFANRNFMQLIHDDSLTFKEDIQKAQVSGQGDSLHEHIANLAGSPAIKKGILQTVKVVDELVKVMGRHKPENIVIEMARENQTTQKGQKNSRERMKRIEEGIKELGSQILKEHPVENTQLQNEKLYLYYLQNGRDMYVDQELDINRLSDYDVDAIVPQSFLKDDSIDNKVLTRSDKNRGKSDNVPSEEVVKKMKNYWRQLLNAKLITQRKFDNLTKAERGGLSELDKAGFIKRQLVETRQITKHVAQILDSRMNTKYDENDKLIREVKVITLKSKLVSDFRKDFQFYKVREINNYHHAHDAYLNAVVGTALIKKYPKLESEFVYGDYKVYDVRKMIAKSEQEIGKATAKYFFYSNIMNFFKTEITLANGEIRKRPLIETNGETGEIVWDKGRDFATVRKVLSMPQVNIVKKTEVQTGGFSKESILPKRNSDKLIARKKDWDPKKYGGFDSPTVAYSVLVVAKVEKGKSKKLKSVKELLGITIMERSSFEKNPIDFLEAKGYKEVKKDLIIKLPKYSLFELENGRKRMLASAGELQKGNELALPSKYVNFLYLASHYEKLKGSPEDNEQKQLFVEQHKHYLDEIIEQISEFSKRVILADANLDKVLSAYNKHRDKPIREQAENIIHLFTLTNLGAPAAFKYFDTTIDRKRYTSTKEVLDATLIHQSITGLYETRIDLSQLGGDSGGSSGGSSGSETPGTSESATPESSGGSSGGSSTLELQRWKHKFEIKPGVWVFAPSPEAVKNGSKILNAVRKHWNPPLYFFHLRTGGHLKATRLHLKNTYFAVVDIKQFFLSTSRSRVTRCLNEYFSYEKAREISRYSTVKNPSSGLHKYVLPFGFVQSPILATLCLDKSYLGSLLRKLSRKGTMKLSIYMDDVIISSNDFQTLQTTYQEILQAMEKSGYKLNLKKSQPPSNKIVVFNISLRHGNMSVTAERLSEFLIDFYASNDEQHKLGIANYVRSVNLEQAKLFRSGGSKRTADGSEFEPKKKRKV

SEQ ID NO: 983 - protein, 1692 aa, synthetic construct
MKRTADGSEFESPKKKRKVDKKYSIGLDIGTNSVGWAVITDEYKVPSKKFKVLGNTDRHSIKKNLIGALLFDSGETAEATRLKRTARRRYTRRKNRICYLQEIFSNEMAKVDDSFFHRLEESFLVEEDKKHERHPIFGNIVDEVAYHEKYPTIYHLRKKLVDSTDKADLRLIYLALAHMIKFRGHFLIEGDLNPDNSDVDKLFIQLVQTYNQLFEENPINASGVDAKAILSARLSKSRRLENLIAQLPGEKKNGLFGNLIALSLGLTPNFKSNFDLAEDAKLQLSKDTYDDDLDNLLAQIGDQYADLFLAAKNLSDAILLSDILRVNTEITKAPLSASMIKRYDEHHQDLTLLKALVRQQLPEKYKEIFFDQSKNGYAGYIDGGASQEEFYKFIKPILEKMDGTEELLVKLNREDLLRKQRTFDNGSIPHQIHLGELHAILRRQEDFYPFLKDNREKIEKILTFRIPYYVGPLARGNSRFAWMTRKSEETITPWNFEEVVDKGASAQSFIERMTNFDKNLPNEKVLPKHSLLYEYFTVYNELTKVKYVTEGMRKPAFLSGEQKKAIVDLLFKTNRKVTVKQLKEDYFKKIECFDSVEISGVEDRFNASLGTYHDLLKIIKDKDFLDNEENEDILEDIVLTLTLFEDREMIEERLKTYAHLFDDKVMKQLKRRRYTGWGRLSRKLINGIRDKQSGKTILDFLKSDGFANRNFMQLIHDDSLTFKEDIQKAQVSGQGDSLHEHIANLAGSPAIKKGILQTVKVVDELVKVMGRHKPENIVIEMARENQTTQKGQKNSRERMKRIEEGIKELGSQILKEHPVENTQLQNEKLYLYYLQNGRDMYVDQELDINRLSDYDVDAIVPQSFLKDDSIDNKVLTRSDKNRGKSDNVPSEEVVKKMKNYWRQLLNAKLITQRKFDNLTKAERGGLSELDKAGFIKRQLVETRQITKHVAQILDSRMNTKYDENDKLIREVKVITLKSKLVSDFRKDFQFYKVREINNYHHAHDAYLNAVVGTALIKKYPKLESEFVYGDYKVYDVRKMIAKSEQEIGKATAKYFFYSNIMNFFKTEITLANGEIRKRPLIETNGETGEIVWDKGRDFATVRKVLSMPQVNIVKKTEVQTGGFSKESILPKRNSDKLIARKKDWDPKKYGGFDSPTVAYSVLVVAKVEKGKSKKLKSVKELLGITIMERSSFEKNPIDFLEAKGYKEVKKDLIIKLPKYSLFELENGRKRMLASAGELQKGNELALPSKYVNFLYLASHYEKLKGSPEDNEQKQLFVEQHKHYLDEIIEQISEFSKRVILADANLDKVLSAYNKHRDKPIREQAENIIHLFTLTNLGAPAAFKYFDTTIDRKRYTSTKEVLDATLIHQSITGLYETRIDLSQLGGDSGGSSGGSSGSETPGTSESATPESSGGSSGGSSKPTWLHKFEVKENRWVYIPDAETHHLGQKIHTYIKHKWKSPLYMFHLREGGHVAAANYHIKKKYFSLIDISNFFGATSQSRVTRELGRLIPYVKAREIARLSTVKNLNGNGLKHVIPYGYPQSPILASLCFHQSFCGSTINTVSKSGHVSVSIFMDDILLSSDDLGQLENAFDIILEAIRRSGYTVNENKTQPPSLMVNVFNLELSQNSLRVTSKRIVEFLQAFISSKNPHERKGIASYVGSINTAQAKLFRSGGSKRTADGSEFEPKKKRKV

SEQ ID NO: 984 - protein, 1696 aa, synthetic construct
MKRTADGSEFESPKKKRKVDKKYSIGLDIGTNSVGWAVITDEYKVPSKKFKVLGNTDRHSIKKNLIGALLFDSGETAEATRLKRTARRRYTRRKNRICYLQEIFSNEMAKVDDSFFHRLEESFLVEEDKKHERHPIFGNIVDEVAYHEKYPTIYHLRKKLVDSTDKADLRLIYLALAHMIKFRGHFLIEGDLNPDNSDVDKLFIQLVQTYNQLFEENPINASGVDAKAILSARLSKSRRLENLIAQLPGEKKNGLFGNLIALSLGLTPNFKSNFDLAEDAKLQLSKDTYDDDLDNLLAQIGDQYADLFLAAKNLSDAILLSDILRVNTEITKAPLSASMIKRYDEHHQDLTLLKALVRQQLPEKYKEIFFDQSKNGYAGYIDGGASQEEFYKFIKPILEKMDGTEELLVKLNREDLLRKQRTFDNGSIPHQIHLGELHAILRRQEDFYPFLKDNREKIEKILTFRIPYYVGPLARGNSRFAWMTRKSEETITPWNFEEVVDKGASAQSFIERMTNFDKNLPNEKVLPKHSLLYEYFTVYNELTKVKYVTEGMRKPAFLSGEQKKAIVDLLFKTNRKVTVKQLKEDYFKKIECFDSVEISGVEDRFNASLGTYHDLLKIIKDKDFLDNEENEDILEDIVLTLTLFEDREMIEERLKTYAHLFDDKVMKQLKRRRYTGWGRLSRKLINGIRDKQSGKTILDFLKSDGFANRNFMQLIHDDSLTFKEDIQKAQVSGQGDSLHEHIANLAGSPAIKKGILQTVKVVDELVKVMGRHKPENIVIEMARENQTTQKGQKNSRERMKRIEEGIKELGSQILKEHPVENTQLQNEKLYLYYLQNGRDMYVDQELDINRLSDYDVDAIVPQSFLKDDSIDNKVLTRSDKNRGKSDNVPSEEVVKKMKNYWRQLLNAKLITQRKFDNLTKAERGGLSELDKAGFIKRQLVETRQITKHVAQILDSRMNTKYDENDKLIREVKVITLKSKLVSDFRKDFQFYKVREINNYHHAHDAYLNAVVGTALIKKYPKLESEFVYGDYKVYDVRKMIAKSEQEIGKATAKYFFYSNIMNFFKTEITLANGEIRKRPLIETNGETGEIVWDKGRDFATVRKVLSMPQVNIVKKTEVQTGGFSKESILPKRNSDKLIARKKDWDPKKYGGFDSPTVAYSVLVVAKVEKGKSKKLKSVKELLGITIMERSSFEKNPIDFLEAKGYKEVKKDLIIKLPKYSLFELENGRKRMLASAGELQKGNELALPSKYVNFLYLASHYEKLKGSPEDNEQKQLFVEQHKHYLDEIIEQISEFSKRVILADANLDKVLSAYNKHRDKPIREQAENIIHLFTLTNLGAPAAFKYFDTTIDRKRYTSTKEVLDATLIHQSITGLYETRIDLSQLGGDSGGSSGGSSGSETPGTSESATPESSGGSSGGSSTIEVQRWEDKFEIKPGVWVYVPSVEARKVGGKILQDVRNKWIPPLYFYHLRTGGHLKAARLHLKSDFFAVVDIKQFFQSTSRSRITRDLKSYFTYSQAREISTFSTVRNLSHSPHKHVLPFGFVQSPILATLCLDKSYFGSLLRRLNKHHDLKLSVFMDDVIISSNDLAQLQAAYDEALVAMRKSGYQANMSKTQAPSSKISVFNLTLSKGVMKVTSQKMSDFLIDFYSSNYEPHRIGVKNYVEAVNPGQAKLFKLSGGSKRTADGSEFEPKKKRKV

SEQ ID NO: 985 - protein, 1694 aa, synthetic construct
MKRTADGSEFESPKKKRKVDKKYSIGLDIGTNSVGWAVITDEYKVPSKKFKVLGNTDRHSIKKNLIGALLFDSGETAEATRLKRTARRRYTRRKNRICYLQEIFSNEMAKVDDSFFHRLEESFLVEEDKKHERHPIFGNIVDEVAYHEKYPTIYHLRKKLVDSTDKADLRLIYLALAHMIKFRGHFLIEGDLNPDNSDVDKLFIQLVQTYNQLFEENPINASGVDAKAILSARLSKSRRLENLIAQLPGEKKNGLFGNLIALSLGLTPNFKSNFDLAEDAKLQLSKDTYDDDLDNLLAQIGDQYADLFLAAKNLSDAILLSDILRVNTEITKAPLSASMIKRYDEHHQDLTLLKALVRQQLPEKYKEIFFDQSKNGYAGYIDGGASQEEFYKFIKPILEKMDGTEELLVKLNREDLLRKQRTFDNGSIPHQIHLGELHAILRRQEDFYPFLKDNREKIEKILTFRIPYYVGPLARGNSRFAWMTRKSEETITPWNFEEVVDKGASAQSFIERMTNFDKNLPNEKVLPKHSLLYEYFTVYNELTKVKYVTEGMRKPAFLSGEQKKAIVDLLFKTNRKVTVKQLKEDYFKKIECFDSVEISGVEDRFNASLGTYHDLLKIIKDKDFLDNEENEDILEDIVLTLTLFEDREMIEERLKTYAHLFDDKVMKQLKRRRYTGWGRLSRKLINGIRDKQSGKTILDFLKSDGFANRNFMQLIHDDSLTFKEDIQKAQVSGQGDSLHEHIANLAGSPAIKKGILQTVKVVDELVKVMGRHKPENIVIEMARENQTTQKGQKNSRERMKRIEEGIKELGSQILKEHPVENTQLQNEKLYLYYLQNGRDMYVDQELDINRLSDYDVDAIVPQSFLKDDSIDNKVLTRSDKNRGKSDNVPSEEVVKKMKNYWRQLLNAKLITQRKFDNLTKAERGGLSELDKAGFIKRQLVETRQITKHVAQILDSRMNTKYDENDKLIREVKVITLKSKLVSDFRKDFQFYKVREINNYHHAHDAYLNAVVGTALIKKYPKLESEFVYGDYKVYDVRKMIAKSEQEIGKATAKYFFYSNIMNFFKTEITLANGEIRKRPLIETNGETGEIVWDKGRDFATVRKVLSMPQVNIVKKTEVQTGGFSKESILPKRNSDKLIARKKDWDPKKYGGFDSPTVAYSVLVVAKVEKGKSKKLKSVKELLGITIMERSSFEKNPIDFLEAKGYKEVKKDLIIKLPKYSLFELENGRKRMLASAGELQKGNELALPSKYVNFLYLASHYEKLKGSPEDNEQKQLFVEQHKHYLDEIIEQISEFSKRVILADANLDKVLSAYNKHRDKPIREQAENIIHLFTLTNLGAPAAFKYFDTTIDRKRYTSTKEVLDATLIHQSITGLYETRIDLSQLGGDSGGSSGGSSGSETPGTSESATPESSGGSSGGSSSTPSDWLHKFEIKAERWVFVPSKETLKRGQKIHAYIKQKWKYPRYMFHLRNGGHVAAANFHLKSNYFSLIDVSDFYGTTSQSRVTRELGRLVPYVKAREIARLSTVVNPNRNGFKHVIPYGYPQSPILASLCFHHSFCGGVISSISKSERVFVSVYMDDILLSSDDMNLLVEAFDTVRQALRKSGYTLNENKTQPPSPKIQVFNLELGHNHLRVTPKRIVEFLKVFTSSSNEHERKGIASYVGSINKSQAKLFRSGGSKRTADGSEFEPKKKRKV

SEQ ID NO: 986 - protein, 1691 aa, synthetic construct
MKRTADGSEFESPKKKRKVDKKYSIGLDIGTNSVGWAVITDEYKVPSKKFKVLGNTDRHSIKKNLIGALLFDSGETAEATRLKRTARRRYTRRKNRICYLQEIFSNEMAKVDDSFFHRLEESFLVEEDKKHERHPIFGNIVDEVAYHEKYPTIYHLRKKLVDSTDKADLRLIYLALAHMIKFRGHFLIEGDLNPDNSDVDKLFIQLVQTYNQLFEENPINASGVDAKAILSARLSKSRRLENLIAQLPGEKKNGLFGNLIALSLGLTPNFKSNFDLAEDAKLQLSKDTYDDDLDNLLAQIGDQYADLFLAAKNLSDAILLSDILRVNTEITKAPLSASMIKRYDEHHQDLTLLKALVRQQLPEKYKEIFFDQSKNGYAGYIDGGASQEEFYKFIKPILEKMDGTEELLVKLNREDLLRKQRTFDNGSIPHQIHLGELHAILRRQEDFYPFLKDNREKIEKILTFRIPYYVGPLARGNSRFAWMTRKSEETITPWNFEEVVDKGASAQSFIERMTNFDKNLPNEKVLPKHSLLYEYFTVYNELTKVKYVTEGMRKPAFLSGEQKKAIVDLLFKTNRKVTVKQLKEDYFKKIECFDSVEISGVEDRFNASLGTYHDLLKIIKDKDFLDNEENEDILEDIVLTLTLFEDREMIEERLKTYAHLFDDKVMKQLKRRRYTGWGRLSRKLINGIRDKQSGKTILDFLKSDGFANRNFMQLIHDDSLTFKEDIQKAQVSGQGDSLHEHIANLAGSPAIKKGILQTVKVVDELVKVMGRHKPENIVIEMARENQTTQKGQKNSRERMKRIEEGIKELGSQILKEHPVENTQLQNEKLYLYYLQNGRDMYVDQELDINRLSDYDVDAIVPQSFLKDDSIDNKVLTRSDKNRGKSDNVPSEEVVKKMKNYWRQLLNAKLITQRKFDNLTKAERGGLSELDKAGFIKRQLVETRQITKHVAQILDSRMNTKYDENDKLIREVKVITLKSKLVSDFRKDFQFYKVREINNYHHAHDAYLNAVVGTALIKKYPKLESEFVYGDYKVYDVRKMIAKSEQEIGKATAKYFFYSNIMNFFKTEITLANGEIRKRPLIETNGETGEIVWDKGRDFATVRKVLSMPQVNIVKKTEVQTGGFSKESILPKRNSDKLIARKKDWDPKKYGGFDSPTVAYSVLVVAKVEKGKSKKLKSVKELLGITIMERSSFEKNPIDFLEAKGYKEVKKDLIIKLPKYSLFELENGRKRMLASAGELQKGNELALPSKYVNFLYLASHYEKLKGSPEDNEQKQLFVEQHKHYLDEIIEQISEFSKRVILADANLDKVLSAYNKHRDKPIREQAENIIHLFTLTNLGAPAAFKYFDTTIDRKRYTSTKEVLDATLIHQSITGLYETRIDLSQLGGDSGGSSGGSSGSETPGTSESATPESSGGSSGGSSVKWEHRFELKKDKWVYVPTKEMRLYGTEIHNHLRAKWIPPLYFYHLRDGGHVACAKKHLHNRYFALIDIKNFFESTGQSRLTRELKTYLTYNNARQVAKLSTVRNPLPERPKYIIPYGYPQSPILSTFCLHKSFCGNLFKQLHVNPDIDISIYMDDIILSANDLSSCESAYRLLSEGLERSGYQMNTLKSQFPSEKIHVFNLELKHNSLRVLPFRLIEFLIAYTKSKNRHERKGIASYVGSVNTDQAKLFKSGGSKRTADGSEFEPKKKRKV

SEQ ID NO: 987 - protein, 1689 aa, synthetic construct
MKRTADGSEFESPKKKRKVDKKYSIGLDIGTNSVGWAVITDEYKVPSKKFKVLGNTDRHSIKKNLIGALLFDSGETAEATRLKRTARRRYTRRKNRICYLQEIFSNEMAKVDDSFFHRLEESFLVEEDKKHERHPIFGNIVDEVAYHEKYPTIYHLRKKLVDSTDKADLRLIYLALAHMIKFRGHFLIEGDLNPDNSDVDKLFIQLVQTYNQLFEENPINASGVDAKAILSARLSKSRRLENLIAQLPGEKKNGLFGNLIALSLGLTPNFKSNFDLAEDAKLQLSKDTYDDDLDNLLAQIGDQYADLFLAAKNLSDAILLSDILRVNTEITKAPLSASMIKRYDEHHQDLTLLKALVRQQLPEKYKEIFFDQSKNGYAGYIDGGASQEEFYKFIKPILEKMDGTEELLVKLNREDLLRKQRTFDNGSIPHQIHLGELHAILRRQEDFYPFLKDNREKIEKILTFRIPYYVGPLARGNSRFAWMTRKSEETITPWNFEEVVDKGASAQSFIERMTNFDKNLPNEKVLPKHSLLYEYFTVYNELTKVKYVTEGMRKPAFLSGEQKKAIVDLLFKTNRKVTVKQLKEDYFKKIECFDSVEISGVEDRFNASLGTYHDLLKIIKDKDFLDNEENEDILEDIVLTLTLFEDREMIEERLKTYAHLFDDKVMKQLKRRRYTGWGRLSRKLINGIRDKQSGKTILDFLKSDGFANRNFMQLIHDDSLTFKEDIQKAQVSGQGDSLHEHIANLAGSPAIKKGILQTVKVVDELVKVMGRHKPENIVIEMARENQTTQKGQKNSRERMKRIEEGIKELGSQILKEHPVENTQLQNEKLYLYYLQNGRDMYVDQELDINRLSDYDVDAIVPQSFLKDDSIDNKVLTRSDKNRGKSDNVPSEEVVKKMKNYWRQLLNAKLITQRKFDNLTKAERGGLSELDKAGFIKRQLVETRQITKHVAQILDSRMNTKYDENDKLIREVKVITLKSKLVSDFRKDFQFYKVREINNYHHAHDAYLNAVVGTALIKKYPKLESEFVYGDYKVYDVRKMIAKSEQEIGKATAKYFFYSNIMNFFKTEITLANGEIRKRPLIETNGETGEIVWDKGRDFATVRKVLSMPQVNIVKKTEVQTGGFSKESILPKRNSDKLIARKKDWDPKKYGGFDSPTVAYSVLVVAKVEKGKSKKLKSVKELLGITIMERSSFEKNPIDFLEAKGYKEVKKDLIIKLPKYSLFELENGRKRMLASAGELQKGNELALPSKYVNFLYLASHYEKLKGSPEDNEQKQLFVEQHKHYLDEIIEQISEFSKRVILADANLDKVLSAYNKHRDKPIREQAENIIHLFTLTNLGAPAAFKYFDTTIDRKRYTSTKEVLDATLIHQSITGLYETRIDLSQLGGDSGGSSGGSSGSETPGTSESATPESSGGSSGGSSKWLSRFRLKSNTWVYVPTFETVKEGKLFKKAIEFKWIPPTNYYHLRSGGHVEAVKYHLGGKFFVHADISKFFNSINRSRITRELKPYFGYERSRAIAMESTVSIPVDSGQIFALPFGFVQSTIIASLCLRKSSLGKTIDVLNKTDGIRVSVYVDDIVVSTQCLEKAKAAFLMIQKSAERSGFLLNKEKSQGPSDKITAFNIDLRQNFMEVTSWRFSELLSSYKDATSDKKKSGIWGYVNSVNSAQASMLSGGSKRTADGSEFEPKKKRKV

SEQ ID NO: 988 - RNA, 128 nt, synthetic construct
  source 1..128: mol_type = other RNA
ggggcccagactgagcacgtggttttagtactctggaaacagaatctactgaaacaagacaatatgtcgtgtttatcccatcaatttattggtgggactttcctctgcaatcacgtgctcagtctggg

SEQ ID NO: 989 - RNA, 98 nt, synthetic construct
  source 1..98: mol_type = other RNA
gctgcacatactagcccctgtcgttttagtactctggaaacagaatctactgaaacaagacaatatgtcgtgtttatcccatcaatttattggtggga

SEQ ID NO: 990 - protein, 337 aa, synthetic construct
EKIENEIVNKTYLAINSLEELRNMIGIKSDYFYKCLYVNDHFYNVIKIPKRKKDEYRELMIPNMALKNIQRWILDNVLYRRQVHKCATGFVPRKSIVNNAIPHVGQKYILKMDIENFFPSITFKQVRKIFSEMGYKFELATALANLCTVNNQLPQGAPTSPYIANIIFYNIDKRIFSYCQKNNLRYTRYADDITISGSNKVSFSKEIIREIVNQYNFRINESKTIMFKPGDRKKVTGIIVNEKISVPKTLIREVRKQIYFVNKFGLEEHLIRNNYSLDYEQQFIMSIYGKISFIKMIDFKKGVSLQKKFNEVLGNIESSNMYRDNIDFDDIELHWIN

SEQ ID NO: 991 - protein, 256 aa, synthetic construct
TIEVQRWEDKFEIKPGVWVYVPSVEARKVGGKILQAVRNKWIPPLYFYHLRTGGHLKAARLHLKSDFFAVVDIKQFFQSTSRSRITRDLKSYFTYSQAREISTFSTVRNLSHSPHKHVLPFGFVQSPILATLCLDKSYFGSLLRRLNKHHDLKLSVFMDDVIISSNNLAQLQAAYDEALVAMRKSGYQANMSKTQAPSSKISVFNLTLSKGVMKVTSQKMSDFLIDFYSSNYEPHRIGVKNYVEAVNPGQAKLFKL

SEQ ID NO: 992 - protein, 369 aa, synthetic construct
ELLLGIVIVVTCWMVVRIIRSSKNQEGYKRWRAGNYASENPYAKEKASGPLSQGLFSKRVRTTGARRFDDGAIRWCANLLATEESRLREVLDYIPRQYTCFHVRKRSGGFRYISAPAGDFRSMQQTIYHRILLLANIHPAVTGFCPGKSVSDNARVHLGRKNVLKVDLHDFFPSIRSPRVRAAFREMGYSRPIAKVLAELCCLRCCLPQGAPTSPALSNIIAYPMDKKMMALAGEYGLVYTRYADDLTFSGDYLPKDEVLVRIHRIIREEGFTMNVKKTRFLSEHKRKIITGVSVSSGKKMTLPKVKKREIRKNVHYVLTKGLVGHQEHIGSTDPVYLKRLLGSLCYWRSIEPDNRYVSDSITALKRLM

SEQ ID NO: 993 - protein, 382 aa, synthetic construct
AGMPGFVSAWRSEQPPRVVRVLTRPPFQRPPPPWLHDVALPQLPTLGDLAAWLDIEPGDLGWFADRWRVPTRGAATPLHHYAYKAIEKRDGRCRIIEIPKPRLRALQRKVLSGLLDRIPAHESVHGFRHGRNIVTFAAPHVGKAVVMRFDLTDFFASVHAGRVYSAFYALGYPQAVARALTALCTNRIPSGRLLAPDVRERIDWRERQRYRNRHLPQGAPTSPALANLCAFRLDLRLAGLARSVGATYTRYADDLAFSGDEELARMADRLCIRVAAIALEEGFGVNLRKTRVMRRSARQHLAGVVVNSHANVARPEFDALKAVLTNCVRHGWRSQNRDDLADFRAHLAGRVAHVAMVNAVRGARLRAVFERIEWEEEKPLDA

SEQ ID NO: 994 - protein, 348 aa, synthetic construct
EWIEYREQFITTAKKASKNSGYIKKNLKYAEKLYNQKLPIIYNASHFSKLVGYSLQYLYAASNDSSKFYREFEIKKKNGGSRKISEPLPSLKEIQKWILENILNKIQKEKVSKYAKAYQKKISIKENVKFHRGQKKVLSLDITNFFLNIKIDKIYEVFYNLGYSKSLSTLFSNLCTLNYSLPQGAPTSPILSNIVMLNFDNEIEKIVLEKRIRYTRYADDMTFSGDFLEKEIIKYVKENLNKIGLKINNKKTRVRKNWQQQMVTGIIVNEKIQISRKKRDELRQTMYYIEKYGIDSFLKYKGIKNKVYYLSHLKGILEYAYFINKNDKKLFNYIEYLKNNFFKEKSSI

SEQ ID NO: 995 - protein, 380 aa, synthetic construct
NRWSSRAFKKHNSDKPAAVVETAALYGRKIQTSCPELPVIFTLNHLALKSGVPYNNLRSFVDRTIERPYRSFTLRKNGLGSNPRKFRVIKVPQQDLKKAQQFINQNILSKMEPHECSVAFSPGSKIYDAASEHCNARWLLKFDIVSFFESITEKSVYRVFRRYNYPALLSFEMARICTALKARPPINWGGAPPNIRYRTIPGYSNKNLGTLPQGAPTSPMLANLVSYNLDRRLKLIADAYNCHYSRYADDITFSTDSSLSRGEVSRIIAMINSTLREYGHTMNKAKTTIAPPGARKFYLGMNIHGDSPQLRKSFKRKLKQHLFFCEKNSVGPEKHSKHLGFVSVIGFKNHLRGLINYANQVDTVFGENCMKRFQSIDWPL

SEQ ID NO: 996 - protein, 469 aa, synthetic construct
DSKDMQRLQTTQQRGYPLDREMEFQKTTEVHSISSASRDGRNEVQRYTSKMLEMIVERGNMRAAYKRVVANKGSHGVDGMEVDELLPYLKENWPTIKQQLLEGKYKPQPVRRVEIPKPDGGVRLLGIPTALDRLIQQAIAQILNRVYNHTFSDSSYGFRPGRSAKDAIKAAEAYINEGYTWVVDMDLEKFFDRVNHDIIMSKLEKRIGDKRVLKLIRRYLESGVMINGVKVSTEEGTPQGGPLSPLLANIMLDELDKELEKRGHKFCRYADDCNIYVKSRSAGNRVMKSIKKFIESKLKLKVNEAKSAVDRPWRRKFLGFSFYTKENEVRIRIHEKSIKRFKEKVREITNRNKGISMENRIKRLNQITTGWVNYFGLADAKSIMKTLDEWIRRRLRACIWKQWKKIKTKHDNLVKLGVEEQKAWEYANTRKGYWRISNSPILNKTLTNKYFESIGYKSLSQRYLIVHNS

SEQ ID NO: 997 - protein, 419 aa, synthetic construct
QETKPFGISKNVVMMAFERVKANKGTYGMDEQSIEMYEMDLKNNLYKLWNRMSSGSYFPKPVKAVAIPKKNGGTRTLGIPTVEDRVAQMVAKLYFEPNVERLFYEDSYGYRPNKSAIQAIEATRKRCWRKDWVLEFDIKGLFDNIRHDYLIEMVKRHTNQEWVTLYVQRWLITPFQMEDGTLIERTAGTPQGGVISPVLANLFLHYTFDDFMVKEFSSIPWARYADDGIAHCTSLKQAKYLQRRLEERFKLFGLELNLEKTKIAYCKDDDRQLSYPNTSFDFLGYTFRPRHAKNKHGKFFTNFSPAIADKAKKAIRKEVRSWRLQLKADKTLQDISNMFNKKIQGWINYYGHFYKSEMYSVLRYINSSLIKWVRRKYKKRKHRRKAEYWLGTIAQRERKLFAHWKYGILPATNNGSRMS

SEQ ID NO: 998 - protein, 433 aa, synthetic construct
VPPALWGSRHNQRRFLRNVKKFISLGKHAKLSPQELTWKMKVQDCAWLRGSPGACSVPAAEHRRREGVLARLLCWLMGTYVVELLRSFFYVTETTFQKNRLFFYRKSVWSPLQTLGVRQHCTSVRLRELSAAEVRRQHEARATLLTSRLRFLPKPGGLRPIVNMDYVAGARALCRDKKIQHLTSQVKTLFSVLNYERARRPRLLGASVLGMDDIHRAWHDFVLRVRAQDPAPRLYFVKVDVTGAYDALPQDRLAEVVANVLRPHENTYCLRRYAVVRRTAQGHVRRSFKRHVSTFTDLPPYMRQFVERLQETTSLRDSVVIEQSYSLNEASSGLFQLFLSLVYSHVIRIGGNLLLRLVDDFLLITPHLKRAQAFLRTLVRGVPEYGCSANLQKTAVNFPVEDMALGSTAPLQLPAHCLFPWCGLLLDTQTLEV

SEQ ID NO: 999 - protein, 251 aa, synthetic construct
DKWIHKFEIKEGRWVYVPSEKTREIGGKIHFYIKHKWNYPLYMYHLRKGGHVAAANRHIKKQYFSLIDISDFFGSTSQSRVTRELGKLIPYAKAREIAKLSTVRSPPSNGLKHVIPYGYPQSPILATLCFHQSFCGKLINIISKSGQISVSIYMDDILLSSDDLSQLEIAFNSVKAALAKSGYCINERKTQSPSTMVKVFNLELSQQSLRVSPKRIVEFLQAYISSKNAAERKGIASYVGSVNKSQSTIFK

SEQ ID NO: 1000 - protein, 249 aa, synthetic construct
KRWEHRFQVKSGRWVFVPTPASRAVGEQIRARVAKAWSPPAFYYHLRKGGHVAALRAHADSTYFFRCDLKNFFGSINLSRVTRCLKRYFSYVEARGMASASVVIAPGATKTMLPYGFVQSPLLASLALDQSRAGAYLRKLSAQEGITVSVYMDDIVVSSLEIGLLDKIKAELGEKAEKAGISLNQEKTEGPSTLVTVFNVELSHNSLVISEERMAEFREALMIASCDAVAMGILGYVASVNDAQLSKLY

SEQ ID NO: 1001 - protein, 255 aa, synthetic construct
SNMAPRWINKFEIKPNVWVYEPSEACREEGAEILRFINRKWKIPTYYYHLRRGGHVEALRVHIENDWFVSLDIKEFFQSTSRSRVTRTLRNFLPYEKARIIAKVSTVSNFTNDKFSHFIPFGYVQSPLLATICLHYSSFGQLIKELSRCEDVKLSVYMDDIILSSSSLELLERTKTLLEESASRSHYKLNTLKVQGPAERITAFNIDLSHQSMVISPKRLLSFLVDFNSPDSDNLKREGIRSYIYSVNSEQAEYF

SEQ ID NO: 1002 - protein, 255 aa, synthetic construct
TLELQRWKHKFEIKPGVWVFAPSPEAVKNGSKILNAVRKHWNPPLYFFHLRTGGHLKATRLHLKNTYFAVVDIKQFFLSTSRSRVTRCLNEYFSYEKAREISRYSTVKNPSSGLHKYVLPFGFVQSPILATLCLDKSYLGSLLRKLSRKGTMKLSIYMDDVIISSNDFQTLQTTYQEILQAMEKSGYKLNLKKSQPPSNKIVVFNISLRHGNMSVTAERLSEFLIDFYASNDEQHKLGIANYVRSVNLEQAKLFR

SEQ ID NO: 1003 - protein, 252 aa, synthetic construct
KPTWLHKFEVKENRWVYIPDAETHHLGQKIHTYIKHKWKSPLYMFHLREGGHVAAANYHIKKKYFSLIDISNFFGATSQSRVTRELGRLIPYVKAREIARLSTVKNLNGNGLKHVIPYGYPQSPILASLCFHQSFCGSTINTVSKSGHVSVSIFMDDILLSSDDLGQLENAFDIILEAIRRSGYTVNENKTQPPSLMVNVFNLELSQNSLRVTSKRIVEFLQAFISSKNPHERKGIASYVGSINTAQAKLFR

SEQ ID NO: 1004 - protein, 256 aa, synthetic construct
TIEVQRWEDKFEIKPGVWVYVPSVEARKVGGKILQDVRNKWIPPLYFYHLRTGGHLKAARLHLKSDFFAVVDIKQFFQSTSRSRITRDLKSYFTYSQAREISTFSTVRNLSHSPHKHVLPFGFVQSPILATLCLDKSYFGSLLRRLNKHHDLKLSVFMDDVIISSNDLAQLQAAYDEALVAMRKSGYQANMSKTQAPSSKISVFNLTLSKGVMKVTSQKMSDFLIDFYSSNYEPHRIGVKNYVEAVNPGQAKLFKL

SEQ ID NO: 1005 - protein, 254 aa, synthetic construct
STPSDWLHKFEIKAERWVFVPSKETLKRGQKIHAYIKQKWKYPRYMFHLRNGGHVAAANFHLKSNYFSLIDVSDFYGTTSQSRVTRELGRLVPYVKAREIARLSTVVNPNRNGFKHVIPYGYPQSPILASLCFHHSFCGGVISSISKSERVFVSVYMDDILLSSDDMNLLVEAFDTVRQALRKSGYTLNENKTQPPSPKIQVFNLELGHNHLRVTPKRIVEFLKVFTSSSNEHERKGIASYVGSINKSQAKLFR

SEQ ID NO: 1006 - protein, 251 aa, synthetic construct
VKWEHRFELKKDKWVYVPTKEMRLYGTEIHNHLRAKWIPPLYFYHLRDGGHVACAKKHLHNRYFALIDIKNFFESTGQSRLTRELKTYLTYNNARQVAKLSTVRNPLPERPKYIIPYGYPQSPILSTFCLHKSFCGNLFKQLHVNPDIDISIYMDDIILSANDLSSCESAYRLLSEGLERSGYQMNTLKSQFPSEKIHVFNLELKHNSLRVLPFRLIEFLIAYTKSKNRHERKGIASYVGSVNTDQAKLFK

SEQ ID NO: 1007 - protein, 1908 aa, synthetic construct
MKRTADGSEFESPKKKRKVDKKYSIGLDIGTNSVGWAVITDEYKVPSKKFKVLGNTDRHSIKKNLIGALLFDSGETAEATRLKRTARRRYTRRKNRICYLQEIFSNEMAKVDDSFFHRLEESFLVEEDKKHERHPIFGNIVDEVAYHEKYPTIYHLRKKLVDSTDKADLRLIYLALAHMIKFRGHFLIEGDLNPDNSDVDKLFIQLVQTYNQLFEENPINASGVDAKAILSARLSKSRRLENLIAQLPGEKKNGLFGNLIALSLGLTPNFKSNFDLAEDAKLQLSKDTYDDDLDNLLAQIGDQYADLFLAAKNLSDAILLSDILRVNTEITKAPLSASMIKRYDEHHQDLTLLKALVRQQLPEKYKEIFFDQSKNGYAGYIDGGASQEEFYKFIKPILEKMDGTEELLVKLNREDLLRKQRTFDNGSIPHQIHLGELHAILRRQEDFYPFLKDNREKIEKILTFRIPYYVGPLARGNSRFAWMTRKSEETITPWNFEEVVDKGASAQSFIERMTNFDKNLPNEKVLPKHSLLYEYFTVYNELTKVKYVTEGMRKPAFLSGEQKKAIVDLLFKTNRKVTVKQLKEDYFKKIECFDSVEISGVEDRFNASLGTYHDLLKIIKDKDFLDNEENEDILEDIVLTLTLFEDREMIEERLKTYAHLFDDKVMKQLKRRRYTGWGRLSRKLINGIRDKQSGKTILDFLKSDGFANRNFMQLIHDDSLTFKEDIQKAQVSGQGDSLHEHIANLAGSPAIKKGILQTVKVVDELVKVMGRHKPENIVIEMARENQTTQKGQKNSRERMKRIEEGIKELGSQILKEHPVENTQLQNEKLYLYYLQNGRDMYVDQELDINRLSDYDVDAIVPQSFLKDDSIDNKVLTRSDKNRGKSDNVPSEEVVKKMKNYWRQLLNAKLITQRKFDNLTKAERGGLSELDKAGFIKRQLVETRQITKHVAQILDSRMNTKYDENDKLIREVKVITLKSKLVSDFRKDFQFYKVREINNYHHAHDAYLNAVVGTALIKKYPKLESEFVYGDYKVYDVRKMIAKSEQEIGKATAKYFFYSNIMNFFKTEITLANGEIRKRPLIETNGETGEIVWDKGRDFATVRKVLSMPQVNIVKKTEVQTGGFSKESILPKRNSDKLIARKKDWDPKKYGGFDSPTVAYSVLVVAKVEKGKSKKLKSVKELLGITIMERSSFEKNPIDFLEAKGYKEVKKDLIIKLPKYSLFELENGRKRMLASAGELQKGNELALPSKYVNFLYLASHYEKLKGSPEDNEQKQLFVEQHKHYLDEIIEQISEFSKRVILADANLDKVLSAYNKHRDKPIREQAENIIHLFTLTNLGAPAAFKYFDTTIDRKRYTSTKEVLDATLIHQSITGLYETRIDLSQLGGDSGGSSGGSSGSETPGTSESATPESSGGSSGGSSLTQEDIEEINPEVWAEEGKSGLLDIPPIKIEMQKETPPIRVKQYPISPEGRKGLAPIIEQLLKEGILEPCMSPHNTPILAVKKAEGKYRLVQDLREINKRTVTRHPVVPNPYTLLSQIPREHAWFTIIDLKDAFWACPLAEECRDWFAFEWEHPETKRKQQLRWTRLPQGFTESPNLFGQALEKLLEQFSPEEGVQILQYVDDLLISGEDQSEVRETSIQLLNFLGEKGLKVSKSKLQFVESEVTYLGHLIGKGYKRLSPERIAGILSIPPPKTKRDIRKLLGLFGYCRLWLDKYTQSVKFLYDKLVDSEPIEWTEEDEKQLKDLKEKLSSAPVLSLPDLKKEFDLFVNTEEGVAYGVLTQEWGGCKKPVAFLSKLLDPVARGWPTCLQAVAAAAILIEETQKLTLQGKIRVHTPHDLKTILSQKAQKWLTDSRILRYEIALMNTDNLEFTTSPIQRDRTLTFKRNKKSGGSKRTADGSEFEPKKKRKV

SEQ ID NO: 1008 - protein, 1918 aa, synthetic construct
MKRTADGSEFESPKKKRKVDKKYSIGLDIGTNSVGWAVITDEYKVPSKKFKVLGNTDRHSIKKNLIGALLFDSGETAEATRLKRTARRRYTRRKNRICYLQEIFSNEMAKVDDSFFHRLEESFLVEEDKKHERHPIFGNIVDEVAYHEKYPTIYHLRKKLVDSTDKADLRLIYLALAHMIKFRGHFLIEGDLNPDNSDVDKLFIQLVQTYNQLFEENPINASGVDAKAILSARLSKSRRLENLIAQLPGEKKNGLFGNLIALSLGLTPNFKSNFDLAEDAKLQLSKDTYDDDLDNLLAQIGDQYADLFLAAKNLSDAILLSDILRVNTEITKAPLSASMIKRYDEHHQDLTLLKALVRQQLPEKYKEIFFDQSKNGYAGYIDGGASQEEFYKFIKPILEKMDGTEELLVKLNREDLLRKQRTFDNGSIPHQIHLGELHAILRRQEDFYPFLKDNREKIEKILTFRIPYYVGPLARGNSRFAWMTRKSEETITPWNFEEVVDKGASAQSFIERMTNFDKNLPNEKVLPKHSLLYEYFTVYNELTKVKYVTEGMRKPAFLSGEQKKAIVDLLFKTNRKVTVKQLKEDYFKKIECFDSVEISGVEDRFNASLGTYHDLLKIIKDKDFLDNEENEDILEDIVLTLTLFEDREMIEERLKTYAHLFDDKVMKQLKRRRYTGWGRLSRKLINGIRDKQSGKTILDFLKSDGFANRNFMQLIHDDSLTFKEDIQKAQVSGQGDSLHEHIANLAGSPAIKKGILQTVKVVDELVKVMGRHKPENIVIEMARENQTTQKGQKNSRERMKRIEEGIKELGSQILKEHPVENTQLQNEKLYLYYLQNGRDMYVDQELDINRLSDYDVDAIVPQSFLKDDSIDNKVLTRSDKNRGKSDNVPSEEVVKKMKNYWRQLLNAKLITQRKFDNLTKAERGGLSELDKAGFIKRQLVETRQITKHVAQILDSRMNTKYDENDKLIREVKVITLKSKLVSDFRKDFQFYKVREINNYHHAHDAYLNAVVGTALIKKYPKLESEFVYGDYKVYDVRKMIAKSEQEIGKATAKYFFYSNIMNFFKTEITLANGEIRKRPLIETNGETGEIVWDKGRDFATVRKVLSMPQVNIVKKTEVQTGGFSKESILPKRNSDKLIARKKDWDPKKYGGFDSPTVAYSVLVVAKVEKGKSKKLKSVKELLGITIMERSSFEKNPIDFLEAKGYKEVKKDLIIKLPKYSLFELENGRKRMLASAGELQKGNELALPSKYVNFLYLASHYEKLKGSPEDNEQKQLFVEQHKHYLDEIIEQISEFSKRVILADANLDKVLSAYNKHRDKPIREQAENIIHLFTLTNLGAPAAFKYFDTTIDRKRYTSTKEVLDATLIHQSITGLYETRIDLSQLGGDSGGSSGGSSGSETPGTSESATPESSGGSSGGSSSKEPKQDVTLPQTWLSDFPQAWAETAGMGLAVQQPPIVIQLKATATPVRIKQYPMSREARRGIKPHIQRLLDLGILVPCQSPWNTPLLPVKKPGTNDYRPVQDLREVNKRVEDIHPTVPNPYNLLSSLPPERQWYTVLDLKDAFFCLPLHPESQPLFAFEWRDPETGRSGQLTWTRLPQGFKNSPTIFDEALHRDLADFRIQHPDLTLLQYVDDLLLAADTEQDCLKGTQALLQTLGELGYRASAKKAQLCQREVTYLGYKLKGGQRWLTEARKETVLQIPTPKTPRQVREFLGTAGFCRLWIPGFAELAAPLYPLTKEGNAFNWGEKEEKAFQELKQALLQAPALGLPDLTKPFQLFVDEKQGIAKGVLTQKLGPWKRPVAYLSKKLDPVAAGWPPCLRMIAATALLTKDAGKLTLGQEIVILTPHAVEAVLKQPPDRWLSNARMIHYQALLLDTPRVQFDPSVALNPATTETLPESSGGSKRTADGSEFEPKKKRKV

SEQ ID NO: 1009 - protein, 1918 aa, synthetic construct
MKRTADGSEFESPKKKRKVDKKYSIGLDIGTNSVGWAVITDEYKVPSKKFKVLGNTDRHSIKKNLIGALLFDSGETAEATRLKRTARRRYTRRKNRICYLQEIFSNEMAKVDDSFFHRLEESFLVEEDKKHERHPIFGNIVDEVAYHEKYPTIYHLRKKLVDSTDKADLRLIYLALAHMIKFRGHFLIEGDLNPDNSDVDKLFIQLVQTYNQLFEENPINASGVDAKAILSARLSKSRRLENLIAQLPGEKKNGLFGNLIALSLGLTPNFKSNFDLAEDAKLQLSKDTYDDDLDNLLAQIGDQYADLFLAAKNLSDAILLSDILRVNTEITKAPLSASMIKRYDEHHQDLTLLKALVRQQLPEKYKEIFFDQSKNGYAGYIDGGASQEEFYKFIKPILEKMDGTEELLVKLNREDLLRKQRTFDNGSIPHQIHLGELHAILRRQEDFYPFLKDNREKIEKILTFRIPYYVGPLARGNSRFAWMTRKSEETITPWNFEEVVDKGASAQSFIERMTNFDKNLPNEKVLPKHSLLYEYFTVYNELTKVKYVTEGMRKPAFLSGEQKKAIVDLLFKTNRKVTVKQLKEDYFKKIECFDSVEISGVEDRFNASLGTYHDLLKIIKDKDFLDNEENEDILEDIVLTLTLFEDREMIEERLKTYAHLFDDKVMKQLKRRRYTGWGRLSRKLINGIRDKQSGKTILDFLKSDGFANRNFMQLIHDDSLTFKEDIQKAQVSGQGDSLHEHIANLAGSPAIKKGILQTVKVVDELVKVMGRHKPENIVIEMARENQTTQKGQKNSRERMKRIEEGIKELGSQILKEHPVENTQLQNEKLYLYYLQNGRDMYVDQELDINRLSDYDVDAIVPQSFLKDDSIDNKVLTRSDKNRGKSDNVPSEEVVKKMKNYWRQLLNAKLITQRKFDNLTKAERGGLSELDKAGFIKRQLVETRQITKHVAQILDSRMNTKYDENDKLIREVKVITLKSKLVSDFRKDFQFYKVREINNYHHAHDAYLNAVVGTALIKKYPKLESEFVYGDYKVYDVRKMIAKSEQEIGKATAKYFFYSNIMNFFKTEITLANGEIRKRPLIETNGETGEIVWDKGRDFATVRKVLSMPQVNIVKKTEVQTGGFSKESILPKRNSDKLIARKKDWDPKKYGGFDSPTVAYSVLVVAKVEKGKSKKLKSVKELLGITIMERSSFEKNPIDFLEAKGYKEVKKDLIIKLPKYSLFELENGRKRMLASAGELQKGNELALPSKYVNFLYLASHYEKLKGSPEDNEQKQLFVEQHKHYLDEIIEQISEFSKRVILADANLDKVLSAYNKHRDKPIREQAENIIHLFTLTNLGAPAAFKYFDTTIDRKRYTSTKEVLDATLIHQSITGLYETRIDLSQLGGDSGGSSGGSSGSETPGTSESATPESSGGSSGGSSQKEPTQDVTLPQTWLTDFPQAWAETAGMGLAVQQAPLVIELKATATPVSIKQYPMSREARRGIKPHIQRLLDQGILVPCQSPWNTPLLPVKKPGTNDYRPVQDLREVNKRVEDIHPTVPNPYNLLSGLPPERQWYTVLDLKDAFFCLRLHPTSQPLFAFEWRDPETGMSGQLTWTRLPQGFKNSPTIFDEALHRDLADFRIQHPDVTLLQYVDDLLLAADTEQDCLKGTQALLQTLGELGYRASAKKAQICQREVTYLGYKLKGGQRWLTEARKETVLQIPTPKTARQVREFLGTAGFCRLWIPGFAELAAPLYPLTKEGSAFNWGEKEEKAFQELKQALLTAPALGLPDLTKPFQLFVDEKQGIAKGVLTQKLGPWRRPVAYLSKKLDPVAAGWPPCLRMVAATALLTKDAGKLTMGQEIVILTPHAVEAVLKQPPDRWLSNARMIHYQALLLDTPRVQFHPTVALNPATTEPLPESSGGSKRTADGSEFEPKKKRKV

SEQ ID NO: 1010 - protein, 2087 aa, synthetic construct
MKRTADGSEFESPKKKRKVDKKYSIGLDIGTNSVGWAVITDEYKVPSKKFKVLGNTDRHSIKKNLIGALLFDSGETAEATRLKRTARRRYTRRKNRICYLQEIFSNEMAKVDDSFFHRLEESFLVEEDKKHERHPIFGNIVDEVAYHEKYPTIYHLRKKLVDSTDKADLRLIYLALAHMIKFRGHFLIEGDLNPDNSDVDKLFIQLVQTYNQLFEENPINASGVDAKAILSARLSKSRRLENLIAQLPGEKKNGLFGNLIALSLGLTPNFKSNFDLAEDAKLQLSKDTYDDDLDNLLAQIGDQYADLFLAAKNLSDAILLSDILRVNTEITKAPLSASMIKRYDEHHQDLTLLKALVRQQLPEKYKEIFFDQSKNGYAGYIDGGASQEEFYKFIKPILEKMDGTEELLVKLNREDLLRKQRTFDNGSIPHQIHLGELHAILRRQEDFYPFLKDNREKIEKILTFRIPYYVGPLARGNSRFAWMTRKSEETITPWNFEEVVDKGASAQSFIERMTNFDKNLPNEKVLPKHSLLYEYFTVYNELTKVKYVTEGMRKPAFLSGEQKKAIVDLLFKTNRKVTVKQLKEDYFKKIECFDSVEISGVEDRFNASLGTYHDLLKIIKDKDFLDNEENEDILEDIVLTLTLFEDREMIEERLKTYAHLFDDKVMKQLKRRRYTGWGRLSRKLINGIRDKQSGKTILDFLKSDGFANRNFMQLIHDDSLTFKEDIQKAQVSGQGDSLHEHIANLAGSPAIKKGILQTVKVVDELVKVMGRHKPENIVIEMARENQTTQKGQKNSRERMKRIEEGIKELGSQILKEHPVENTQLQNEKLYLYYLQNGRDMYVDQELDINRLSDYDVDAIVPQSFLKDDSIDNKVLTRSDKNRGKSDNVPSEEVVKKMKNYWRQLLNAKLITQRKFDNLTKAERGGLSELDKAGFIKRQLVETRQITKHVAQILDSRMNTKYDENDKLIREVKVITLKSKLVSDFRKDFQFYKVREINNYHHAHDAYLNAVVGTALIKKYPKLESEFVYGDYKVYDVRKMIAKSEQEIGKATAKYFFYSNIMNFFKTEITLANGEIRKRPLIETNGETGEIVWDKGRDFATVRKVLSMPQVNIVKKTEVQTGGFSKESILPKRNSDKLIARKKDWDPKKYGGFDSPTVAYSVLVVAKVEKGKSKKLKSVKELLGITIMERSSFEKNPIDFLEAKGYKEVKKDLIIKLPKYSLFELENGRKRMLASAGELQKGNELALPSKYVNFLYLASHYEKLKGSPEDNEQKQLFVEQHKHYLDEIIEQISEFSKRVILADANLDKVLSAYNKHRDKPIREQAENIIHLFTLTNLGAPAAFKYFDTTIDRKRYTSTKEVLDATLIHQSITGLYETRIDLSQLGGDSGGSSGGSSGSETPGTSESATPESSGGSSGGSSLPKQVEDAVVPWVWSTEGPGKAVAVEPVVIELKPGEQPVRIKQYPMKREARKGIKPIIERFLKLGILEECQSPYNTPILPVKKPNGEYRLVQDLRAVNKITVTIYPVVPNPYTLLSSLSPEHQWFTVIDLKDAFFCIPLEPESQKIFAFEWEDPETGRKTQLTWTRLPQGFKNSPTIFGEALAKDLQEWKAPPESGTLLQYVDDLLIATETKETCIKATIALLNFLGEKGYRVSKKKAQLVQQEVTYLGYEISKGQRRLSPDRKEAICQIPKPKTVRELRSFLGMVGWCRLWIPNYGLLAKPLYELLKEGSDPLNWTEEEEKAFQQLKQALTTAPALGLPDLSKPFQLFVNEKQGIALGVLTQKLGPWKRPVAYLSKQLDPVAAGWPSCLRAVAATAILIQEARKLTLGQKMVVYVPHTVSAVLEQKAGHWLSSSRLLKYQAILLDQPDVELKVTKVINPATFLYSEPEPVHHDCLETIEASYSSRPDLKDTPLEDAEEWFTDGSSYVINGKRKSGYAIITCKEVIESGPLNPSYSAQKAELIALTRALELAKGRTGNIYTDSKYAFGVVHAHGAIWKELADREAKKAAKTDLQQPLKALFLPKRLSIIHCPGHQKGHSAEARGNRMADQAARKAAITETPDTSTLLSGGSKRTADGSEFEPKKKRKV

SEQ ID NO: 1011 - protein, 1367 aa, synthetic construct
DKKYSIGLDIGTNSVGWAVITDEYKVPSKKFKVLGNTDRHSIKKNLIGALLFDSGETAEATRLKRTARRRYTRRKNRICYLQEIFSNEMAKVDDSFFHRLEESFLVEEDKKHERHPIFGNIVDEVAYHEKYPTIYHLRKKLVDSTDKADLRLIYLALAHMIKFRGHFLIEGDLNPDNSDVDKLFIQLVQTYNQLFEENPINASGVDAKAILSARLSKSRRLENLIAQLPGEKKNGLFGNLIALSLGLTPNFKSNFDLAEDAKLQLSKDTYDDDLDNLLAQIGDQYADLFLAAKNLSDAILLSDILRVNTEITKAPLSASMIKRYDEHHQDLTLLKALVRQQLPEKYKEIFFDQSKNGYAGYIDGGASQEEFYKFIKPILEKMDGTEELLVKLNREDLLRKQRTFDNGSIPHQIHLGELHAILRRQEDFYPFLKDNREKIEKILTFRIPYYVGPLARGNSRFAWMTRKSEETITPWNFEEVVDKGASAQSFIERMTNFDKNLPNEKVLPKHSLLYEYFTVYNELTKVKYVTEGMRKPAFLSGEQKKAIVDLLFKTNRKVTVKQLKEDYFKKIECFDSVEISGVEDRFNASLGTYHDLLKIIKDKDFLDNEENEDILEDIVLTLTLFEDREMIEERLKTYAHLFDDKVMKQLKRRRYTGWGRLSRKLINGIRDKQSGKTILDFLKSDGFANRNFMQLIHDDSLTFKEDIQKAQVSGQGDSLHEHIANLAGSPAIKKGILQTVKVVDELVKVMGRHKPENIVIEMARENQTTQKGQKNSRERMKRIEEGIKELGSQILKEHPVENTQLQNEKLYLYYLQNGRDMYVDQELDINRLSDYDVDAIVPQSFLKDDSIDNKVLTRSDKNRGKSDNVPSEEVVKKMKNYWRQLLNAKLITQRKFDNLTKAERGGLSELDKAGFIKRQLVETRQITKHVAQILDSRMNTKYDENDKLIREVKVITLKSKLVSDFRKDFQFYKVREINNYHHAHDAYLNAVVGTALIKKYPKLESEFVYGDYKVYDVRKMIAKSEQEIGKATAKYFFYSNIMNFFKTEITLANGEIRKRPLIETNGETGEIVWDKGRDFATVRKVLSMPQVNIVKKTEVQTGGFSKESILPKRNSDKLIARKKDWDPKKYGGFDSPTVAYSVLVVAKVEKGKSKKLKSVKELLGITIMERSSFEKNPIDFLEAKGYKEVKKDLIIKLPKYSLFELENGRKRMLASAGELQKGNELALPSKYVNFLYLASHYEKLKGSPEDNEQKQLFVEQHKHYLDEIIEQISEFSKRVILADANLDKVLSAYNKHRDKPIREQAENIIHLFTLTNLGAPAAFKYFDTTIDRKRYTSTKEVLDATLIHQSITGLYETRIDLSQLGGD

SEQ ID NO: 1012 - protein, 2131 aa, synthetic construct
MKRTADGSEFESPKKKRKVDKKYSIGLDIGTNSVGWAVITDEYKVPSKKFKVLGNTDRHSIKKNLIGALLFDSGETAEATRLKRTARRRYTRRKNRICYLQEIFSNEMAKVDDSFFHRLEESFLVEEDKKHERHPIFGNIVDEVAYHEKYPTIYHLRKKLVDSTDKADLRLIYLALAHMIKFRGHFLIEGDLNPDNSDVDKLFIQLVQTYNQLFEENPINASGVDAKAILSARLSKSRKLENLIAQLPGEKKNGLFGNLIALSLGLTPNFKSNFDLAEDAKLQLSKDTYDDDLDNLLAQIGDQYADLFLAAKNLSDAILLSDILRVNTEITKAPLSASMIKRYDEHHQDLTLLKALVRQQLPEKYKEIFFDQSKNGYAGYIDGGASQEEFYKFIKPILEKMDGTEELLVKLKREDLLRKQRTFDNGSIPHQIHLGELHAILRRQEDFYPFLKDNREKIEKILTFRIPYYVGPLARGNSRFAWMTRKSEETITPWNFEEVVDKGASAQSFIERMTNFDKNLPNEKVLPKHSLLYEYFTVYNELTKVKYVTEGMRKPAFLSGEQKKAIVDLLFKTNRKVTVKQLKEDYFKKIECFDSVEISGVEDRFNASLGTYHDLLKIIKDKDFLDNEENEDILEDIVLTLTLFEDREMIEERLKTYAHLFDDKVMKQLKRRRYTGWGRLSRKLINGIRDKQSGKTILDFLKSDGFANRNFMQLIHDDSLTFKEDIQKAQVSGQGDSLHEHIANLAGSPAIKKGILQTVKVVDELVKVMGRHKPENIVIEMARENQTTQKGQKNSRERMKRIEEGIKELGSQILKEHPVENTQLQNEKLYLYYLQNGRDMYVDQELDINRLSDYDVDAIVPQSFLKDDSIDNKVLTRSDKNRGKSDNVPSEEVVKKMKNYWRQLLNAKLITQRKFDNLTKAERGGLSELDKAGFIKRQLVETRQITKHVAQILDSRMNTKYDENDKLIREVKVITLKSKLVSDFRKDFQFYKVREINNYHHAHDAYLNAVVGTALIKKYPKLESEFVYGDYKVYDVRKMIAKSEQEIGKATAKYFFYSNIMNFFKTEITLANGEIRKRPLIETNGETGEIVWDKGRDFATVRKVLSMPQVNIVKKTEVQTGGFSKESILPKRNSDKLIARKKDWDPKKYGGFDSPTVAYSVLVVAKVEKGKSKKLKSVKELLGITIMERSSFEKNPIDFLEAKGYKEVKKDLIIKLPKYSLFELENGRKRMLASAGELQKGNELALPSKYVNFLYLASHYEKLKGSPEDNEQKQLFVEQHKHYLDEIIEQISEFSKRVILADANLDKVLSAYNKHRDKPIREQAENIIHLFTLTNLGAPAAFKYFDTTIDRKRYTSTKEVLDATLIHQSITGLYETRIDLSQLGGDSGGSSGGSKRTADGSEFESPKKKRKVSGGSSGGSTLNIEDEYRLHETSKEPDVSLGSTWLSDFPQAWAETGGMGLAVRQAPLIIPLKATSTPVSIKQYPMSQEARLGIKPHIQRLLDQGILVPCQSPWNTPLLPVKKPGTNDYRPVQDLREVNKRVEDIHPTVPNPYNLLSGLPPSHQWYTVLDLKDAFFCLRLHPTSQPLFAFEWRDPEMGISGQLTWTRLPQGFKNSPTLFNEALHRDLADFRIQHPDLILLQYVDDLLLAATSELDCQQGTRALLQTLGNLGYRASAKKAQICQKQVKYLGYLLKEGQRWLTEARKETVMGQPTPKTPRQLREFLGKAGFCRLFIPGFAEMAAPLYPLTKPGTLFNWGPDQQKAYQEIKQALLTAPALGLPDLTKPFELFVDEKQGYAKGVLTQKLGPWRRPVAYLSKKLDPVAAGWPPCLRMVAAIAVLTKDAGKLTMGQPLVILAPHAVEALVKQPPDRWLSNARMTHYQALLLDTDRVQFGPVVALNPATLLPLPEEGLQHNCLDILAEAHGTRPDLTDQPLPDADHTWYTDGSSLLQEGQRKAGAAVTTETEVIWAKALPAGTSAQRAELIALTQALKMAEGKKLNVYTDSRYAFATAHIHGEIYRRRGWLTSEGKEIKNKDEILALLKALFLPKRLSIIHCPGHQKGHSAEARGNRMADQAARKAAITETPDTSTLLIENSSPSGGSKRTADGSEFESPKKKRKVGSGPAAKRVKLD

SEQ ID NO: 1013 - protein, 1367 aa, synthetic construct
DKKYSIGLDIGTNSVGWAVITDEYKVPSKKFKVLGNTDRHSIKKNLIGALLFDSGETAEATRLKRTARRRYTRRKNRICYLQEIFSNEMAKVDDSFFHRLEESFLVEEDKKHERHPIFGNIVDEVAYHEKYPTIYHLRKKLVDSTDKADLRLIYLALAHMIKFRGHFLIEGDLNPDNSDVDKLFIQLVQTYNQLFEENPINASGVDAKAILSARLSKSRKLENLIAQLPGEKKNGLFGNLIALSLGLTPNFKSNFDLAEDAKLQLSKDTYDDDLDNLLAQIGDQYADLFLAAKNLSDAILLSDILRVNTEITKAPLSASMIKRYDEHHQDLTLLKALVRQQLPEKYKEIFFDQSKNGYAGYIDGGASQEEFYKFIKPILEKMDGTEELLVKLKREDLLRKQRTFDNGSIPHQIHLGELHAILRRQEDFYPFLKDNREKIEKILTFRIPYYVGPLARGNSRFAWMTRKSEETITPWNFEEVVDKGASAQSFIERMTNFDKNLPNEKVLPKHSLLYEYFTVYNELTKVKYVTEGMRKPAFLSGEQKKAIVDLLFKTNRKVTVKQLKEDYFKKIECFDSVEISGVEDRFNASLGTYHDLLKIIKDKDFLDNEENEDILEDIVLTLTLFEDREMIEERLKTYAHLFDDKVMKQLKRRRYTGWGRLSRKLINGIRDKQSGKTILDFLKSDGFANRNFMQLIHDDSLTFKEDIQKAQVSGQGDSLHEHIANLAGSPAIKKGILQTVKVVDELVKVMGRHKPENIVIEMARENQTTQKGQKNSRERMKRIEEGIKELGSQILKEHPVENTQLQNEKLYLYYLQNGRDMYVDQELDINRLSDYDVDAIVPQSFLKDDSIDNKVLTRSDKNRGKSDNVPSEEVVKKMKNYWRQLLNAKLITQRKFDNLTKAERGGLSELDKAGFIKRQLVETRQITKHVAQILDSRMNTKYDENDKLIREVKVITLKSKLVSDFRKDFQFYKVREINNYHHAHDAYLNAVVGTALIKKYPKLESEFVYGDYKVYDVRKMIAKSEQEIGKATAKYFFYSNIMNFFKTEITLANGEIRKRPLIETNGETGEIVWDKGRDFATVRKVLSMPQVNIVKKTEVQTGGFSKESILPKRNSDKLIARKKDWDPKKYGGFDSPTVAYSVLVVAKVEKGKSKKLKSVKELLGITIMERSSFEKNPIDFLEAKGYKEVKKDLIIKLPKYSLFELENGRKRMLASAGELQKGNELALPSKYVNFLYLASHYEKLKGSPEDNEQKQLFVEQHKHYLDEIIEQISEFSKRVILADANLDKVLSAYNKHRDKPIREQAENIIHLFTLTNLGAPAAFKYFDTTIDRKRYTSTKEVLDATLIHQSITGLYETRIDLSQLGGD

SEQ ID NO: 1014 - protein, 34 aa, synthetic construct
SGGSSGGSKRTADGSEFESPKKKRKVSGGSSGGS

SEQ ID NO: 1015 - protein, 22 aa, synthetic construct
SGGSKRTADGSEFESPKKKRKV

SEQ ID NO: 1016 - protein, 12 aa, synthetic construct
GSGPAAKRVKLD

SEQ ID NO: 1017 - RNA, 119 nt, synthetic construct
  source 1..119: mol_type = other RNA
ggcccagactgagcacgtgagttttagagctagaaatagcaagttaaaataaggctagtccgttatcaacttgaaaaagtggcaccgagtcggtgctctgcgatcacgtgctcagtctg

SEQ ID NO: 1018 - RNA, 125 nt, synthetic construct
  source 1..125: mol_type = other RNA
gtcatcttagtcattacctggttttagagctagaaatagcaagttaaaataaggctagtccgttatcaacttgaaaaagtggcaccgagtcggtgcaacgaacacatcaggtaatgactaagatg

SEQ ID NO: 1019 - RNA, 131 nt, synthetic construct
  source 1..131: mol_type = other RNA
gatgtctgcaggccagatgagttttagagctagaaatagcaagttaaaataaggctagtccgttatcaacttgaaaaagtggcaccgagtcggtgcaatgtgccatctggagcactcatctggcctgcaga

SEQ ID NO: 1020 - RNA, 123 nt, synthetic construct
  source 1..123: mol_type = other RNA
gagtccgagcagaagaagaagttttagagctagaaatagcaagttaaaataaggctagtccgttatcaacttgaaaaagtggcaccgagtcggtgatgggagcacttcttcttctgctcggac

SEQ ID NO: 1021 - RNA, 125 nt, synthetic construct
  source 1..125: mol_type = other RNA
ggaatcccttctgcagcaccgttttagagctagaaatagcaagttaaaataaggctagtccgttatcaacttgaaaaagtggcaccgagtcggtgggaaaagcgatcaaggtgctgcagaaggga

SEQ ID NO: 1022 - RNA, 119 nt, synthetic construct
  source 1..119: mol_type = other RNA
gttgatgtctgcaggccagatggttttagtactctggaaacagaatctactgaaacaagacaatatgtcgtgtttatcccatcaatttattggtgggagagacctcatctggcctgcag

SEQ ID NO: 1023 - RNA, 121 nt, synthetic construct
  source 1..121: mol_type = other RNA
gttgatgtctgcaggccagatggttttagtactctggaaacagaatctactgaaacaagacaatatgtcgtgtttatcccatcaatttattggtgggatggagacctcatctggcctgcag

SEQ ID NO: 1024 - RNA, 123 nt, synthetic construct
  source 1..123: mol_type = other RNA
gttgatgtctgcaggccagatggttttagtactctggaaacagaatctactgaaacaagacaatatgtcgtgtttatcccatcaatttattggtgggatctggagacctcatctggcctgcag

SEQ ID NO: 1025 - RNA, 123 nt, synthetic construct
  source 1..123: mol_type = other RNA
gttgatgtctgcaggccagatggttttagtactctggaaacagaatctactgaaacaagacaatatgtcgtgtttatcccatcaatttattggtgggatggagacctcatctggcctgcagac

SEQ ID NO: 1026 - RNA, 125 nt, synthetic construct
  source 1..125: mol_type = other RNA
gttgatgtctgcaggccagatggttttagtactctggaaacagaatctactgaaacaagacaatatgtcgtgtttatcccatcaatttattggtgggatctggagacctcatctggcctgcagac

SEQ ID NO: 1027 - RNA, 123 nt, synthetic construct
  source 1..123: mol_type = other RNA
gttgatgtctgcaggccagatggttttagtactctggaaacagaatctactgaaacaagacaatatgtcgtgtttatcccatcaatttattggtgggagagacctcatctggcctgcagacat

SEQ ID NO: 1028 - RNA, 125 nt, synthetic construct
  source 1..125: mol_type = other RNA
gttgatgtctgcaggccagatggttttagtactctggaaacagaatctactgaaacaagacaatatgtcgtgtttatcccatcaatttattggtgggatggagacctcatctggcctgcagacat

SEQ ID NO: 1029 - RNA, 127 nt, synthetic construct
  source 1..127: mol_type = other RNA
gttgatgtctgcaggccagatggttttagtactctggaaacagaatctactgaaacaagacaatatgtcgtgtttatcccatcaatttattggtgggatctggagacctcatctggcctgcagacat

SEQ ID NO: 1030 - RNA, 118 nt, synthetic construct
  source 1..118: mol_type = other RNA
gcaaacagctacatatttgggagttttagtactctggaaacagaatctactgaaacaagacaatatgtcgtgtttatcccatcaatttattggtgggacaactcaagtcccaaatatg

SEQ ID NO: 1031 - RNA, 121 nt, synthetic construct
  source 1..121: mol_type = other RNA
gcaaacagctacatatttgggagttttagtactctggaaacagaatctactgaaacaagacaatatgtcgtgtttatcccatcaatttattggtgggaaagcaactcaagtcccaaatatg

SEQ ID NO: 1032 - RNA, 124 nt, synthetic construct
  source 1..124: mol_type = other RNA
gcaaacagctacatatttgggagttttagtactctggaaacagaatctactgaaacaagacaatatgtcgtgtttatcccatcaatttattggtgggaatgaagcaactcaagtcccaaatatg

SEQ ID NO: 1033 - RNA, 120 nt, synthetic construct
  source 1..120: mol_type = other RNA
gcaaacagctacatatttgggagttttagtactctggaaacagaatctactgaaacaagacaatatgtcgtgtttatcccatcaatttattggtgggacaactcaagtcccaaatatgta

SEQ ID NO: 1034 - RNA, 123 nt, synthetic construct
  source 1..123: mol_type = other RNA
gcaaacagctacatatttgggagttttagtactctggaaacagaatctactgaaacaagacaatatgtcgtgtttatcccatcaatttattggtgggaaagcaactcaagtcccaaatatgta

SEQ ID NO: 1035 - RNA, 126 nt, synthetic construct
  source 1..126: mol_type = other RNA
gcaaacagctacatatttgggagttttagtactctggaaacagaatctactgaaacaagacaatatgtcgtgtttatcccatcaatttattggtgggaatgaagcaactcaagtcccaaatatgta

SEQ ID NO: 1036 - RNA, 122 nt, synthetic construct
  source 1..122: mol_type = other RNA
gcaaacagctacatatttgggagttttagtactctggaaacagaatctactgaaacaagacaatatgtcgtgtttatcccatcaatttattggtgggacaactcaagtcccaaatatgtagc

SEQ ID NO: 1037 - RNA, 125 nt, synthetic construct
  source 1..125: mol_type = other RNA
gcaaacagctacatatttgggagttttagtactctggaaacagaatctactgaaacaagacaatatgtcgtgtttatcccatcaatttattggtgggaaagcaactcaagtcccaaatatgtagc

SEQ ID NO: 1038 - RNA, 128 nt, synthetic construct
  source 1..128: mol_type = other RNA
gcaaacagctacatatttgggagttttagtactctggaaacagaatctactgaaacaagacaatatgtcgtgtttatcccatcaatttattggtgggaatgaagcaactcaagtcccaaatatgtagc

SEQ ID NO: 1039 - RNA, 98 nt, synthetic construct
  source 1..98: mol_type = other RNA
gcatgtacagagagcccagggcgttttagtactctggaaacagaatctactgaaacaagacaatatgtcgtgtttatcccatcaatttattggtggga

SEQ ID NO: 1040 - RNA, 97 nt, synthetic construct
  source 1..97: mol_type = other RNA
gctccagatggcacattgtcagttttagtactctggaaacagaatctactgaaacaagacaatatgtcgtgtttatcccatcaatttattggtggga

SEQ ID NO: 1041 - RNA, 118 nt, synthetic construct
  source 1..118: mol_type = other RNA
gctccctggcccaggtgaaggtgttttagtactctggaaacagaatctactgaaacaagacaatatgtcgtgtttatcccatcaatttattggtgggatggaagcacaccttcacctg

SEQ ID NO: 1042 - RNA, 120 nt, synthetic construct
  source 1..120: mol_type = other RNA
gctccctggcccaggtgaaggtgttttagtactctggaaacagaatctactgaaacaagacaatatgtcgtgtttatcccatcaatttattggtgggatctggaagcacaccttcacctg

SEQ ID NO: 1043 - RNA, 122 nt, synthetic construct
  source 1..122: mol_type = other RNA
gctccctggcccaggtgaaggtgttttagtactctggaaacagaatctactgaaacaagacaatatgtcgtgtttatcccatcaatttattggtgggagttctggaagcacaccttcacctg

SEQ ID NO: 1044 - RNA, 120 nt, synthetic construct
  source 1..120: mol_type = other RNA
gctccctggcccaggtgaaggtgttttagtactctggaaacagaatctactgaaacaagacaatatgtcgtgtttatcccatcaatttattggtgggatggaagcacaccttcacctggg

SEQ ID NO: 1045 - RNA, 122 nt, synthetic construct
  source 1..122: mol_type = other RNA
gctccctggcccaggtgaaggtgttttagtactctggaaacagaatctactgaaacaagacaatatgtcgtgtttatcccatcaatttattggtgggatctggaagcacaccttcacctggg

SEQ ID NO: 1046 - RNA, 124 nt, synthetic construct
  source 1..124: mol_type = other RNA
gctccctggcccaggtgaaggtgttttagtactctggaaacagaatctactgaaacaagacaatatgtcgtgtttatcccatcaatttattggtgggagttctggaagcacaccttcacctggg

SEQ ID NO: 1047 - RNA, 122 nt, synthetic construct
  source 1..122: mol_type = other RNA
gctccctggcccaggtgaaggtgttttagtactctggaaacagaatctactgaaacaagacaatatgtcgtgtttatcccatcaatttattggtgggatggaagcacaccttcacctgggcc

SEQ ID NO: 1048 - RNA, 124 nt, synthetic construct
  source 1..124: mol_type = other RNA
gctccctggcccaggtgaaggtgttttagtactctggaaacagaatctactgaaacaagacaatatgtcgtgtttatcccatcaatttattggtgggatctggaagcacaccttcacctgggcc

SEQ ID NO: 1049 - RNA, 126 nt, synthetic construct
  source 1..126: mol_type = other RNA
gctccctggcccaggtgaaggtgttttagtactctggaaacagaatctactgaaacaagacaatatgtcgtgtttatcccatcaatttattggtgggagttctggaagcacaccttcacctgggcc

SEQ ID NO: 1050 - RNA, 118 nt, synthetic construct
  source 1..118: mol_type = other RNA
gctgcttcgtggcaatgcgccagttttagtactctggaaacagaatctactgaaacaagacaatatgtcgtgtttatcccatcaatttattggtgggaatcaacaggtggcgcattgc

SEQ ID NO: 1051 - RNA, 120 nt, synthetic construct
  source 1..120: mol_type = other RNA
gctgcttcgtggcaatgcgccagttttagtactctggaaacagaatctactgaaacaagacaatatgtcgtgtttatcccatcaatttattggtgggaacatcaacaggtggcgcattgc

SEQ ID NO: 1052 - RNA, 123 nt, synthetic construct
  source 1..123: mol_type = other RNA
gctgcttcgtggcaatgcgccagttttagtactctggaaacagaatctactgaaacaagacaatatgtcgtgtttatcccatcaatttattggtgggaatcacatcaacaggtggcgcattgc

SEQ ID NO: 1053 - RNA, 120 nt, synthetic construct
  source 1..120: mol_type = other RNA
gctgcttcgtggcaatgcgccagttttagtactctggaaacagaatctactgaaacaagacaatatgtcgtgtttatcccatcaatttattggtgggaatcaacaggtggcgcattgcca

SEQ ID NO: 1054 - RNA, 122 nt, synthetic construct
  source 1..122: mol_type = other RNA
gctgcttcgtggcaatgcgccagttttagtactctggaaacagaatctactgaaacaagacaatatgtcgtgtttatcccatcaatttattggtgggaacatcaacaggtggcgcattgcca

SEQ ID NO: 1055 - RNA, 125 nt, synthetic construct
  source 1..125: mol_type = other RNA
gctgcttcgtggcaatgcgccagttttagtactctggaaacagaatctactgaaacaagacaatatgtcgtgtttatcccatcaatttattggtgggaatcacatcaacaggtggcgcattgcca

SEQ ID NO: 1056 - RNA, 122 nt, synthetic construct
  source 1..122: mol_type = other RNA
gctgcttcgtggcaatgcgccagttttagtactctggaaacagaatctactgaaacaagacaatatgtcgtgtttatcccatcaatttattggtgggaatcaacaggtggcgcattgccacg

SEQ ID NO: 1057 - RNA, 124 nt, synthetic construct
  source 1..124: mol_type = other RNA
gctgcttcgtggcaatgcgccagttttagtactctggaaacagaatctactgaaacaagacaatatgtcgtgtttatcccatcaatttattggtgggaacatcaacaggtggcgcattgccacg

SEQ ID NO: 1058 - RNA, 127 nt, synthetic construct
  source 1..127: mol_type = other RNA
gctgcttcgtggcaatgcgccagttttagtactctggaaacagaatctactgaaacaagacaatatgtcgtgtttatcccatcaatttattggtgggaatcacatcaacaggtggcgcattgccacg

SEQ ID NO: 1059 - RNA, 98 nt, synthetic construct
  source 1..98: mol_type = other RNA
gtgggagcccttcttcttctgcgttttagtactctggaaacagaatctactgaaacaagacaatatgtcgtgtttatcccatcaatttattggtggga

SEQ ID NO: 1060 - RNA, 97 nt, synthetic construct
  source 1..97: mol_type = other RNA
gaaccggaggacaaagtacaagttttagtactctggaaacagaatctactgaaacaagacaatatgtcgtgtttatcccatcaatttattggtggga

SEQ ID NO: 1061 - RNA, 119 nt, synthetic construct
  source 1..119: mol_type = other RNA
gcagtcatcttagtcattacctgttttagtactctggaaacagaatctactgaaacaagacaatatgtcgtgtttatcccatcaatttattggtgggaacacgtcaggtaatgactaag

SEQ ID NO: 1062 - RNA, 121 nt, synthetic construct
  source 1..121: mol_type = other RNA
gcagtcatcttagtcattacctgttttagtactctggaaacagaatctactgaaacaagacaatatgtcgtgtttatcccatcaatttattggtgggagaacacgtcaggtaatgactaag

SEQ ID NO: 1063 - RNA, 123 nt, synthetic construct
  source 1..123: mol_type = other RNA
gcagtcatcttagtcattacctgttttagtactctggaaacagaatctactgaaacaagacaatatgtcgtgtttatcccatcaatttattggtgggaacgaacacgtcaggtaatgactaag

SEQ ID NO: 1064 - RNA, 121 nt, synthetic construct
  source 1..121: mol_type = other RNA
gcagtcatcttagtcattacctgttttagtactctggaaacagaatctactgaaacaagacaatatgtcgtgtttatcccatcaatttattggtgggaacacgtcaggtaatgactaagat

SEQ ID NO: 1065 - RNA, 123 nt, synthetic construct
  source 1..123: mol_type = other RNA
gcagtcatcttagtcattacctgttttagtactctggaaacagaatctactgaaacaagacaatatgtcgtgtttatcccatcaatttattggtgggagaacacgtcaggtaatgactaagat

SEQ ID NO: 1066 - RNA, 125 nt, synthetic construct
  source 1..125: mol_type = other RNA
gcagtcatcttagtcattacctgttttagtactctggaaacagaatctactgaaacaagacaatatgtcgtgtttatcccatcaatttattggtgggaacgaacacgtcaggtaatgactaagat

SEQ ID NO: 1067 - RNA, 122 nt, synthetic construct
  source 1..122: mol_type = other RNA
gcagtcatcttagtcattacctgttttagtactctggaaacagaatctactgaaacaagacaatatgtcgtgtttatcccatcaatttattggtgggaacacgtcaggtaatgactaagatg

SEQ ID NO: 1068 - RNA, 124 nt, synthetic construct
  source 1..124: mol_type = other RNA
gcagtcatcttagtcattacctgttttagtactctggaaacagaatctactgaaacaagacaatatgtcgtgtttatcccatcaatttattggtgggagaacacgtcaggtaatgactaagatg

SEQ ID NO: 1069 - RNA, 126 nt, synthetic construct
  source 1..126: mol_type = other RNA
gcagtcatcttagtcattacctgttttagtactctggaaacagaatctactgaaacaagacaatatgtcgtgtttatcccatcaatttattggtgggaacgaacacgtcaggtaatgactaagatg

SEQ ID NO: 1070 - RNA, 118 nt, synthetic construct
  source 1..118: mol_type = other RNA
gtgtctcaggctgtgcagacaagttttagtactctggaaacagaatctactgaaacaagacaatatgtcgtgtttatcccatcaatttattggtgggaagttgcgtttgtctgcacag

SEQ ID NO: 1071 - RNA, 120 nt, synthetic construct
  source 1..120: mol_type = other RNA
gtgtctcaggctgtgcagacaagttttagtactctggaaacagaatctactgaaacaagacaatatgtcgtgtttatcccatcaatttattggtgggatgagttgcgtttgtctgcacag

SEQ ID NO: 1072 - RNA, 123 nt, synthetic construct
  source 1..123: mol_type = other RNA
gtgtctcaggctgtgcagacaagttttagtactctggaaacagaatctactgaaacaagacaatatgtcgtgtttatcccatcaatttattggtgggaggttgagttgcgtttgtctgcacag

SEQ ID NO: 1073 - RNA, 120 nt, synthetic construct
  source 1..120: mol_type = other RNA
gtgtctcaggctgtgcagacaagttttagtactctggaaacagaatctactgaaacaagacaatatgtcgtgtttatcccatcaatttattggtgggaagttgcgtttgtctgcacagcc

SEQ ID NO: 1074 - RNA, 122 nt, synthetic construct
  source 1..122: mol_type = other RNA
gtgtctcaggctgtgcagacaagttttagtactctggaaacagaatctactgaaacaagacaatatgtcgtgtttatcccatcaatttattggtgggatgagttgcgtttgtctgcacagcc

SEQ ID NO: 1075 - RNA, 125 nt, synthetic construct
  source 1..125: mol_type = other RNA
gtgtctcaggctgtgcagacaagttttagtactctggaaacagaatctactgaaacaagacaatatgtcgtgtttatcccatcaatttattggtgggaggttgagttgcgtttgtctgcacagcc

SEQ ID NO: 1076 - RNA, 121 nt, synthetic construct
  source 1..121: mol_type = other RNA
gtgtctcaggctgtgcagacaagttttagtactctggaaacagaatctactgaaacaagacaatatgtcgtgtttatcccatcaatttattggtgggaagttgcgtttgtctgcacagcct

SEQ ID NO: 1077 - RNA, 123 nt, synthetic construct
  source 1..123: mol_type = other RNA
gtgtctcaggctgtgcagacaagttttagtactctggaaacagaatctactgaaacaagacaatatgtcgtgtttatcccatcaatttattggtgggatgagttgcgtttgtctgcacagcct

SEQ ID NO: 1078 - RNA, 126 nt, synthetic construct
  source 1..126: mol_type = other RNA
gtgtctcaggctgtgcagacaagttttagtactctggaaacagaatctactgaaacaagacaatatgtcgtgtttatcccatcaatttattggtgggaggttgagttgcgtttgtctgcacagcct

SEQ ID NO: 1079 - RNA, 116 nt, synthetic construct
  source 1..116: mol_type = other RNA
gagcgatccaggtgctgcagagttttagtactctggaaacagaatctactgaaacaagacaatatgtcgtgtttatcccatcaatttattggtgggagaatcacttctgcagcacc

SEQ ID NO: 1080 - RNA, 119 nt, synthetic construct
  source 1..119: mol_type = other RNA
gagcgatccaggtgctgcagagttttagtactctggaaacagaatctactgaaacaagacaatatgtcgtgtttatcccatcaatttattggtgggaatggaatcacttctgcagcacc

SEQ ID NO: 1081 - RNA, 122 nt, synthetic construct
  source 1..122: mol_type = other RNA
gagcgatccaggtgctgcagagttttagtactctggaaacagaatctactgaaacaagacaatatgtcgtgtttatcccatcaatttattggtgggactcatggaatcacttctgcagcacc

SEQ ID NO: 1082 - RNA, 118 nt, synthetic construct
  source 1..118: mol_type = other RNA
gagcgatccaggtgctgcagagttttagtactctggaaacagaatctactgaaacaagacaatatgtcgtgtttatcccatcaatttattggtgggagaatcacttctgcagcacctg

SEQ ID NO: 1083 - RNA, 121 nt, synthetic construct
  source 1..121: mol_type = other RNA
gagcgatccaggtgctgcagagttttagtactctggaaacagaatctactgaaacaagacaatatgtcgtgtttatcccatcaatttattggtgggaatggaatcacttctgcagcacctg

SEQ ID NO: 1084 - RNA, 124 nt, synthetic construct
  source 1..124: mol_type = other RNA
gagcgatccaggtgctgcagagttttagtactctggaaacagaatctactgaaacaagacaatatgtcgtgtttatcccatcaatttattggtgggactcatggaatcacttctgcagcacctg

SEQ ID NO: 1085 - RNA, 120 nt, synthetic construct
  source 1..120: mol_type = other RNA
gagcgatccaggtgctgcagagttttagtactctggaaacagaatctactgaaacaagacaatatgtcgtgtttatcccatcaatttattggtgggagaatcacttctgcagcacctgga

SEQ ID NO: 1086 - RNA, 123 nt, synthetic construct
  source 1..123: mol_type = other RNA
gagcgatccaggtgctgcagagttttagtactctggaaacagaatctactgaaacaagacaatatgtcgtgtttatcccatcaatttattggtgggaatggaatcacttctgcagcacctgga

SEQ ID NO: 1087 - RNA, 126 nt, synthetic construct
  source 1..126: mol_type = other RNA
gagcgatccaggtgctgcagagttttagtactctggaaacagaatctactgaaacaagacaatatgtcgtgtttatcccatcaatttattggtgggactcatggaatcacttctgcagcacctgga

SEQ ID NO: 1088 - RNA, 98 nt, synthetic construct
  source 1..98: mol_type = other RNA
gacgcagagagtcgccgtctccgttttagtactctggaaacagaatctactgaaacaagacaatatgtcgtgtttatcccatcaatttattggtggga

SEQ ID NO: 1089 - RNA, 116 nt, synthetic construct
  source 1..116: mol_type = other RNA
ggggcccagactgagcacgtggttttagtactctggaaacagaatctactgaaacaagacaatatgtcgtgtttatcccatcaatttattggtgggatctgcaatcacgtgctcag

SEQ ID NO: 1090 - RNA, 119 nt, synthetic construct
  source 1..119: mol_type = other RNA
ggggcccagactgagcacgtggttttagtactctggaaacagaatctactgaaacaagacaatatgtcgtgtttatcccatcaatttattggtgggatcctctgcaatcacgtgctcag

SEQ ID NO: 1091 - RNA, 122 nt, synthetic construct
  source 1..122: mol_type = other RNA
ggggcccagactgagcacgtggttttagtactctggaaacagaatctactgaaacaagacaatatgtcgtgtttatcccatcaatttattggtgggactttcctctgcaatcacgtgctcag

SEQ ID NO: 1092 - RNA, 118 nt, synthetic construct
  source 1..118: mol_type = other RNA
ggggcccagactgagcacgtggttttagtactctggaaacagaatctactgaaacaagacaatatgtcgtgtttatcccatcaatttattggtgggatctgcaatcacgtgctcagtc

SEQ ID NO: 1093 - RNA, 121 nt, synthetic construct
  source 1..121: mol_type = other RNA
ggggcccagactgagcacgtggttttagtactctggaaacagaatctactgaaacaagacaatatgtcgtgtttatcccatcaatttattggtgggatcctctgcaatcacgtgctcagtc

SEQ ID NO: 1094 - RNA, 124 nt, synthetic construct
  source 1..124: mol_type = other RNA
ggggcccagactgagcacgtggttttagtactctggaaacagaatctactgaaacaagacaatatgtcgtgtttatcccatcaatttattggtgggactttcctctgcaatcacgtgctcagtc

SEQ ID NO: 1095 - RNA, 120 nt, synthetic construct
  source 1..120: mol_type = other RNA
ggggcccagactgagcacgtggttttagtactctggaaacagaatctactgaaacaagacaatatgtcgtgtttatcccatcaatttattggtgggatctgcaatcacgtgctcagtctg

SEQ ID NO: 1096 - RNA, 123 nt, synthetic construct
  source 1..123: mol_type = other RNA
ggggcccagactgagcacgtggttttagtactctggaaacagaatctactgaaacaagacaatatgtcgtgtttatcccatcaatttattggtgggatcctctgcaatcacgtgctcagtctg

SEQ ID NO: 1097 - RNA, 126 nt, synthetic construct
  source 1..126: mol_type = other RNA
ggggcccagactgagcacgtggttttagtactctggaaacagaatctactgaaacaagacaatatgtcgtgtttatcccatcaatttattggtgggactttcctctgcaatcacgtgctcagtctg

SEQ ID NO: 1098 - RNA, 122 nt, synthetic construct
  source 1..122: mol_type = other RNA
ggggcccagactgagcacgtggttttagtactctggaaacagaatctactgaaacaagacaatatgtcgtgtttatcccatcaatttattggtgggatctgcaatcacgtgctcagtctggg

SEQ ID NO: 1099 - RNA, 125 nt, synthetic construct
  source 1..125: mol_type = other RNA
ggggcccagactgagcacgtggttttagtactctggaaacagaatctactgaaacaagacaatatgtcgtgtttatcccatcaatttattggtgggatcctctgcaatcacgtgctcagtctggg

SEQ ID NO: 1100 - protein, 1113 aa, synthetic construct
MDKKYSIGLDIGTNSVGWAVITDEYKVPSKKFKVLGNTDRHSIKKNLIGALLFDSGETAEATRLKRTARRRYTRRKNRICYLQEIFSNEMAKVDDSFFHRLEESFLVEEDKKHERHPIFGNIVDEVAYHEKYPTIYHLRKKLVDSTDKADLRLIYLALAHMIKFRGHFLIEGDLNPDNSDVDKLFIQLVQTYNQLFEENPINASGVDAKAILSARLSKSRRLENLIAQLPGEKKNGLFGNLIALSLGLTPNFKSNFDLAEDAKLQLSKDTYDDDLDNLLAQIGDQYADLFLAAKNLSDAILLSDILRVNTEITKAPLSASMIKRYDEHHQDLTLLKALVRQQLPEKYKEIFFDQSKNGYAGYIDGGASQEEFYKFIKPILEKMDGTEELLVKLNREDLLRKQRTFDNGSIPHQIHLGELHAILRRQEDFYPFLKDNREKIEKILTFRIPYYVGPLARGNSRFAWMTRKSEETITPWNFEEVVDKGASAQSFIERMTNFDKNLPNEKVLPKHSLLYEYFTVYNELTKVKYVTEGMRKPAFLSGEQKKAIVDLLFKTNRKVTVKQLKEDYFKKIECFDSVEISGVEDRFNASLGTYHDLLKIIKDKDFLDNEENEDILEDIVLTLTLFEDREMIEERLKTYAHLFDDKVMKQLKRRRYTGWGRLSRKLINGIRDKQSGKTILDFLKSDGFANRNFMQLIHDDSLTFKEDIQKAQVSGQGDSLHEHIANLAGSPAIKKGILQTVKVVDELVKVMGRHKPENIVIEMARENQTTQKGQKNSRERMKRIEEGIKELGSQILKEHPVENTQLQNEKLYLYYLQNGRDMYVDQELDINRLSDYDVDAIVPQSFLKDDSIDNKVLTRSDKNRGKSDNVPSEEVVKKMKNYWRQLLNAKLITQRKFDNLTKAERGGLSELDKAGFIKRQLVETRQITKHVAQILDSRMNTKYDENDKLIREVKVITLKSKLVSDFRKDFQFYKVREINNYHHAHDAYLNAVVGTALIKKYPKLESEFVYGDYKVYDVRKMIAKSEQEIGKATAKYFFYSNIMNFFKTEITLANGEIRKRPLIETNGETGEIVWDKGRDFATVRKVLSMPQVNIVKKTEVQTGGFSKESIRPK

SEQ ID NO: 1101 - protein, 5 aa, synthetic construct
RYADD

SEQ ID NO: 1102 - protein, 12 aa, synthetic construct
YTRXXYXDDXXS

SEQ ID NO: 1103 - protein, 746 aa, synthetic construct
NLHRGGGLTSPPTLHQVLPNQDPASILPVIPLDPARRPVIKAQVDTQTSHPKTIEALLDTGADMTVLPIALFSSNTPLKNTSVLGAGGQTQDHFKLTSLPVLIRLPFRTTPIVLTSCLVDTKNNWAIIGRDALQQCQGVLYLPEAKRPHVILPIQAPAVLGLEHLPRPPQISQFPLNPERLQACQHWVRKAWEAGHIEHYTGPGNNPCFPVKKANGTWRFIHDLRATNSLTIDLSSSSPGPPDLSSLPTTLAHLQTIDLRDAFFQIPLPKQFQPYFAFTVPQQCNYGPGTRYAWKVLPQGFKNSPTLFEMQLAHILQPIRQAFPQCTILQYMDDILLASPSHEDLLLLSEATMASLISHGLPVSENKTQQTPGTIKFLGQIISPNHITYDAVPTVPIRSRWALPELQALLGEIQWVSKGTPTLRQPLHSLYCALQRHTDPRDQIYLNPSQVQSLVQLRQALSQNCRSRLVQTLPILGAIMLTLTGTTTVVFQSKEQWPLVWLHAPLPHTSQCPWGQLLASAVLLLDKYTLQSYGLLCQTIHHNISTQTFNHFIQTSDHPSVPILLHHCHRFKNLGAQTGELWNTFLKTAAPLAPVKALMPVFTLSPVIINTAPCLFSDGSTSRAAYILWDKQILSQRSFPLPPPHKSAQRAELLGLLHGLSSARSWRCLNIFLDSKYLCHYLRTLAFGTFQGRSSQAPFQALLPRLLSRKVVYLHHVRSHTNLPDPISRLNAFTDALLITPVLQLS

SEQ ID NO: 1104 - protein, 746 aa, synthetic construct
NLLRGGGLTSPRTDQLPLPNRDPVSILPVIPLDQQHRPILDVQVSVQGNPPRPVQALLDTGADMTVLPIALCPGDTPLQDTTVLGAGGQTQDHFKLLSLPVHIHLPFRRTPVVLTSCLVDTNNNWAIIGRDALQQCQGVLYLPEDKRPHQILPIQTPNVIGLEHLPPPPQVSQFPLNPERLQALNDLVSKALEAGHIEPYQGPGNNPVFPVKKPNGKWRFIHDLRATNSITTDLASPSPGPPDLTSLPTTLPHLQTIDLTDAFFQIPLPKQFQPYFAFTIPQPCNYGPGTRYAWTVLPQGFKNSPTLFEQQLAHVLQPIRKAFPQCTIIQYMDDILLASPSHEELQTLSEMVMNALTTHGLPVSPEKTQQTPGQIRFLGQVISPNHITYETVPTIPIKSQWTLTELQSMLGEIQWVSKGTPTLRQHLHSLYCALRGHRDPRDQIYWTPSQVHALHTIQQALSHNCRSRLVPALPILGLIMLSPTGTTSVIFQPKQKWPLVWLHTPLPPTSLCPWGQLLACAILTLDKYTLQHYGQLCQSFHHNISNQALCHFLQTSDHPSVGILLHHCHRFHNLGAQPSGPWRTLLQMPAILQEVRVLMPVFTLSPVVIDTAPCLFSDGSTSKAAYVLWDKQILHQDSFPLPSHHHSAQRAELLGLLHGLQSARPWPCLNIFLDSKYLCGYLRSLALGAFQGTSTQCSLQALLPPLLQGKVVYLHHVRSHTNLPDPISRLNEYTDALMLAPLLPLS

SEQ ID NO: 1105 - protein, 746 aa, synthetic construct
NLHRGGGLTSPHTDQQVLPNQDPVSILPVIPLDQQRQPILHVQVSVQGTPPKPVQALLDTGADMTVLPMALCPGDTPLQDTTVLGAGGQTQDHFKLLSCPVHIHLPFRRTPVVLTSCLVDTNNNWAIIGRDALQQCQGVLYLPEDKRPHVILPIQTPNVIGLEHLPPPPQISQFPLNPERLQALNDLVSKALEAGHIEPYQGPGNNPVFPVKKPNGKWRFIHDLRATNSLTTDLASPSPGPPDLTSLPTTLPHLQTIDLTDAFFQIPLPKQFQPYFAFTIPQPCNYGPGTRYAWKVLPQGFKNSPTLFEMQLAHILQPIRKAFPQCTIIQYMDDILLASPSHEELQQLSEMTMNALTTHGLPVSPEKTQQTPGQIRFLGQVISPNHITYETVPTIPIKSQWTLPELQAMLGEIQWVSKGTPVLRQHLHSLYCALRGHRDPRDQIHLTPSQVQALHTIQQALSHNCRSRLVSALPILGLIMLSPTGTTSVIFQPKQQWPLVWLHTPHPHTSLCPWGQLLACAILTLDKYTLQHYGQLCQSFHHNISNQAFNHFIQTSDHPSVPILLHHCHRFHNLGAQPSGPWRTFLQMPALLQEVRVLRPVFTLSPVVIDTAPCLFSDGSTSKAAYILWDKQILHQDVFPLPSHHCSAQRGELLGLLCGLSSAKPWPCLNIFLDSKYLIHYLRSLALGAFLGTSTQCSLQAHLPPLLQGKVVYLHHVRSHTNLPDPISRLNEYTDALMLAPLLPLS

SEQ ID NO: 1106 - protein, 668 aa, synthetic construct
VDIEKVIQQKIDETDFNKDKLREILINARKGKNDCGKIGDRFNHTIHGGIHHPQRQYPLNRGAKEEMDKIINELMEQGIIRKCNAPTNSPIQAVKKPDGSWRLVCNFKALNRCTVPDRGYLINPQGTLEKLTRKKYHSTIDLANGFWSIPLAKDSQGKTAFTYKGKQYVWNRLPQGYCNSPNVFQAAVMEVLDDNGVTVYIDDVFIADDNEEEHLERLRKIIEKLDDAGFKINLKKCQIGRYEVNYLGFEVSGDERGLSRGFREKVSEIKPPKSRKELQKILGKFNYVRDFVPNYSGYAKPLYKCLKKEPFIWDANAQGCLDDLKKAIQAAVRHVTRKPEDNLVVEINCSKDEAAIKLKNEGGEETVKYWSYNFSRAEKKYADEEKCLATLARYWKVIKQMATGKKIKVITQYQELAYLTRESQENHKAHNCRWGKWEDILYDPQLEFGPRNGEDPDKPGPPEWCYYTDGSKKEGEAWWGFMLRQDGKERFREKGRAPGSAQAGEVTAIMEGLMEMGKRKIKKCRLVTDSYYCYQGLKEDLAIWEENGFENAKGKPVAHRDLWKKIAELKMLEPEVIHQRAHTHEGPHWRGNDEVDRYVRQRKIVEEYVGEVVREVHDALGHPGTRPTRKECEEHGLWIPVKQYQRILRDCEVCGKYNAGQRLDGGHL

SEQ ID NO: 1107 - protein, 674 aa, synthetic construct
TLQLEDEYRLFEPETTQSQMDVWLQDFPQAWAETGGMGRAHCQAPIIIQLKATATPVSIKQYPMSHEAYMGIKPHIRRMLDQGILRPCRSPWNTPLLPVKKPGTQDYRPVQDLREVNKRVEDIHPTVPNPYNLLSTLPPSHTWYTVLDLKDAFFCLRLHPESQELFAFEWRDPEMGISGQLTWTRLPQGFKNSPTLFNEALHRDLADFRVQHPELVLLQYVDDLLLAATTKTACIQGTKHLLQTLGDKGYRASAKKAQICQTQVTYLGYILRDGQRWLTPARKETVMHIPPPRNPRQVREFLGKAGFCRLFIPGFAEMAAPLYPLTKEGTLFQWGTEHQLAFEDIKKALLSSPALGLPDITKPFELFIDEKQGYAKGVLTQKLGPWKRPVAYLSKKLDPVAAGWPPCLRMMAAIAMLVKDAGKLTLGQPLTIITPHAVEAIVRQPPDRWISNARMTHYQAMLLDTDRVQFGPVVTLNPATLLPLPEEGEHHDCRQILAETHGTRPDLTDQPLPDADHTWYTDGSSYIDNGERKAGAAVTTEHEVIWAQALPPGTSAQRAELIALTQALKMAEGKKLNVYTDSRYAFATAHVHGEIYRRRGWLTSEGKEIKNKSEIIALLKALFLPKRLSIIHCPGHQKGDSPEARGNRLADQVAREAAMETTPTLTTLPEEDSH

SEQ ID NO: 1108 - protein, 677 aa, synthetic construct
TLQLEDEYRLYEPESEQDQPEMDTWLTNFPQAWAETGGMGLAHCQAPLIIQLKATATPVSIKQYPMSHEAYQGIKPHIRRMLDQGILVPCQSPWNTPLLPVKKPGTNDYRPVQDLREVNKRVEDIHPTVPNPYNLLSTLPPSHTWYTVLDLKDAFFCLRLHPESQPLFAFEWRDPEMGLSGQLTWTRLPQGFKNSPTLFNEALHRDLADFRVQHPTLILLQYVDDLLLAATSETECHQGTKALLQTLGNLGYRASAKKAQICQQQVTYLGYQLRDGQRWLTEARKETVMNIPVPKNSRQLREFLGKAGFCRLFIPGFAEMAAPLYPLTKPGTLFQWGAEQQEAFEDIKKALLSSPALGLPDITKPFELFVDEKQGYAKGVLTQRLGPWKRPVAYLSKKLDPVASGWPPCLRMVAAIAVLTKDAGKLTLGQPLTILAPHAVEALVKQPPDRWLSNARMTHYQAMLLDAERVQFGPVVALNPATLLPLPEEGNHHDCLQILAETHGTRPDLTDQPLPDADHTWYTDGSSFLRNGERKAGAAVTTESEVIWASALPAGTSAQRAELIALTQALKMAEGKRLNVYTDSRYAFATAHIHGEIYRRRGWLTSEGKEIKNKNEILALLEALFLPKRLSIIHCPGHQKGDSPEARGNRLADQSAREAAMETHPSTSVLPIEDSTP

SEQ ID NO: 1109 - protein, 840 aa, synthetic construct
TLLNLEDDEYRLYEETEQEPDYEDEPKSPSWDDVSLGDTWLLTSDFPQAAWPQAWAETGGMGLALQQAPAALIIQLKATATPATVSIKQYPMSQEARQGIKPHIQRLLDQGILVPCQSPPWNTPLLPVKKPGTNDYRPVQDLREVNKRVEDIHPTVPNPYNLLSTLPRVELPSHTWYTVLDLKDAFFCLRLHPESQPLFAFEWRDPEMGISGQLTWTRLPQGFKNSPTLFNEALHRDLADFRVQHPHELILILLIILLQYVDDLLLAATSETDCQQGTRALLQTLGDLGYRASAKKAQICQKQVTYLGYLLRDGQRWLTEARKETVMNIPAVPKNPRQLLREFLGKAGFCRLFIPGFAEMAAPLYPLTKPGTTLLLFNWGAEQQKLFEEIKKALLSAPALGLPDLTKPFELFVDEKQGYAKGVLTQRLGPWKGPWKRPVAYLSKKLDPVAALAIAAAGWPPCLRMAGWPPCLRMVAAIAVLTTKDAGKLTLGQQPLTILAPHAVEALVKQPPPDAPDRWLSNARMARMTHYQAALLLDTLRERVQFGPVVALNPATLLPLPVVALPLTPPVVALEEEEGAQQQHDCLQILAETHGTRPDLTDQPLPDADEEEGGDADLAETHGTRPDLDADHTWYTDGSSFLFLQEGERKAGAAVTTETEVIWASAALPPVIGTSAQRAELIALTQALKMAEGKKKKKLNVYTDSRYAFSEILALLEALFLATAHIHGEIYRRRGWLTSEGKEIKNKSEILALLEALFLPKRLSIIHCPGHQKGDSPEARGNRMADQAGTQTPTQPLSLTPAREAAMMGTQVLSLKDQPEPVLVLLTTKDEPTSPPSTTP

SEQ ID NO: 1110 - protein, 812 aa, synthetic construct
TLLNIEDDEYRLHEETETEPTHEETKSEEWDSVSLGSTWLLSSDFPQAAWPQAWAETGGMGLAVRQAPAPALIIPLKATSTPAVSIKQYPMSQEARLGIKPHIQRLLDQGILVPCQSPPWNTPLLPVKKPGTNDYRPVQDLREVNKRVEDIHPTVPNPYNLLSGLPRVELPSHQWYTVLDLKDAFFCLRLHPTSQPLFAFEWRDPEMGISGQLTWTRLPQGFKNSPTLFNEALHRDLADFRIQHPHDLILILLIILLQYVDDLLLAATSENDCQQGTRALLQTLGNLGYRASAKKAQICQKQVKYLGYLLREGQRWLTEARKETVMGQPTVPKTPRQLLREFLGKAGFCRLFIPGFAEMAAPLYPLTKPGTTLLLFNWGPDQQKLYQEIKQALLTAPALGLPDLTKPFELFVDEKQGYAKGVLTQRLGPWRGPWRRPVAYLSKKLDPVAAAAAGWPPCLRMAGWPPCLRMVAAIAVLLTKDAGKLTMGQQPLVILAPHAVEALVKQPPDDAPDRWLSNARMARMTHYQAALLLDTDDDRVQFGPVVALNPATLLPLPVVPLESTPPVVALEEEEGAARHDCLEILAETHGTRPDLTDQPPLPDADEEEGAPDADLAETHGTRPDLDADHTWYTDGSSFLFLQEGQRKAGAAVTTETEVIWAKALALPAVIGTSAQRAELIALTQALKMAEGKKKNKLNVYTDSRYAFSEILALLKALFLATAHIHGEIYRRRGWLTSEGKEIKNKSEILALLKALFLPKRLSIIHCPGHQKGNSAEARGNRMADQATEPAREAAMKETPEDSTLLIEPSTPP

SEQ ID NO: 1111 - protein, 836 aa, synthetic construct
TLLQLEEEEYRLYEEPEEPPKYEPTPTSPPWDDTTWLDEEEFPQVVWPQVWAETNGMGLAKQQPPPPPIHIQLKATATPAVRVRQYPMSKEAREGIRPHIRRLLDQGILVPCHSPPWNTPLLPVRKPGTNDYRMVQDLREVNKRVEDIHPTVPNPYTLLSTLPRVELPDRTWYTVLDLKDAFFCLPLHPESQPLFAFEWRDPEEGESGQLTWTRLPQGFKNSPTLFNEALHRDLADFRVQHPHEVTLTLLTTLLQYVDDLLIAAATKEECLQGTRALLQTLGDLGYRVSAKKAQLCQKEVTYLGYTLKGGTRTLTEARKEAVMQIPAVPKTPRQVVREFLGKVGYCRLFIPGFAELAKPLYPLTKGGTPPPPFTWTEEQEKLFEALKKALLSAPALALPDLTKPFQLFVDERKGVAKGVLTQKLGPWKGPWKRPVAYLSKKLDPVAAAAAGWPPCLRAAGWPPCLRAIAAVALLLVKEASKLTLGQQPLTVITPHALESLLRQPPPDAPDRWMTNARMARMTHYQAALLLDTPRPRVTFAQTAALNPATLLPEPPAALPPTPQTAALDDDDPPPPPHDCAQILAALTGTRPDLTDQPPLPDADDDDPPPDADLAATTGTRPDLDADLTLFTDGSSYVYIEEGKRRAGAAVVTGDSVIWASALALPEVIGTSAQKAELIALTQALKLAEDKKKNKVNIYTDSRYAFAEILALLEALFLATLHVHGAIYKQRGWLTSAGKEIKNAPEILALLEALFLPKRVAVIHCPGHQKGDDPVARGNRMADRVGTTTPTTTPPLTPAKQAAMQGTQVLTLTTKPPPVLVLLLTTEEPPSPPPLTP

SEQ ID NO: 1112 - protein, 676 aa, synthetic construct
TLQLEDEYRLYEPPVKPSQEPDSWLQDFPQAWAETGGMGLAKCQPPVIIQLKATATPVSIRQYPMSKEAREGIRPHIQRLLDQGILVPCQSPWNTPLLPVKKPGTNDYRPVQDLREVNKRVQDIHPTVPNPYNLLSTLPPSRTWYTVLDLKDAFFCLRLHPQSQPLFAFEWRDPEMGISGQLTWTRLPQGFKNSPTLFNEALHRDLADFRVQHPQVTLLQYVDDLLLAAATKQDCQEGTKALLQELGNLGYRASAKKAQICQKEVTYLGYQLRGGKRWLTEARKETVMQIPPPTNPRQVREFLGKAGFCRLFIPGFAELAAPLYPLTKEGTPFTWSEEHQKAFDAIKKALLSAPALGLPDITKPFTLFVDERQGVARGVLTQKLGPWRRPVAYLSKKLDPVASGWPPCLRMIAAVAMLVKDADKLTLGQNLTVIAPHALEAIVRQPPDRWMTNARMTHYQSLLLDTERVQFGPPVALNPATLLPLEEDEPPTHDCHQILAEEHGTRKDLTDQPLPDADHTWYTDGSSFIVEGKRRAGAAVVDGTRTIWASSLPEGTSAQKAELIALTQALRMAEGKKINIYTDSRYAFATAHVHGAIYKRRGWLTSEGKEIKNKEEILALLEALFLPKRVAIIHCPGHQKGNDPVARGNRMADQVARQAAMGTTPTLTVLPEEESS

SEQ ID NO: 1113 - protein, 838 aa, synthetic construct
VLLNLEEEEYRLHEEKEHPVPPEPSSPSIDWPPSSWLLQQLFPTVVWPNVWAEKAGMGLANQVVPPPPVAPVVVELKSDASPVAVRQYPMSKEAREGIRPHIQRFLDLGILVPCQSPPWNTPLLPVKKPGTNDYRPVQDLREVNKRVQDIHPTVPNPYNLLSSLPRVQLPSHTWYSVLDLKDAFFCLKLHPNSQPLFAFEWRDPEKGNTGQLTWTRLPQGFKNSPTLFNEALHRDLASFRALNPNQVVLVLLVVLLQYVDDLLVAAPTYRDCKEGTQRLLQELSKLGYRVSAKKAQLCQKEVTYLGYLLKGGKRWLTPARKATVMKIPTVPTTPRQVVREFLGKAGFCRLFIPGFASLAAPLYPLTKESVVPPPFTWTEEHQKLFDRIKEALLSAPALALPDLTKPFALYVDERAGVARGVLTQTLGPWRRGPWRRRPVAYLSKKLDPVASLAASGWPTCLKASGWPTCLKAIAAVALLLLKDADKLTLGQQNVTVIAPHSLESIVRQPPDDAPDRWMTNARMARMTHYQSSLLLNEERVSFAPPAVLNPATLLPVEPAVLPATPPPAVLSDSDTPPVVHRCSEILAEETGTRKDLTDQPPLLPGVPSSDTTPPGVPLAEETGTRPDLVPAWYTDGSSSFIFIMEGKRRAGAAIVDGKRRTVWASSSSLPETVGTSAQKAELIALTQALRLAEGKKSINSINIYTDSRYAFEEILALLEAIHLPATAHIHGAIYKQRGWLTSAGKDIKNKEEILALLEAIHLPKRVAIIHCPGHQKGNDPVATGNRRADEATTTTLTRTLTETAKQAAQQSTRVLTETTKPQPVLVLTETTTKPQEHH

SEQ ID NO: 1114 - protein, 836 aa, synthetic construct
TLLQLEDDEYRLYEEPEPPVTPETTPTSPPWDDTTWLLDQDFPQAAWPQAWAETGGMGLAKCQAPAPPIIIQLKATATPAVSIRQYPMSKEAHQGIRPHIRRLLDQGILVPCQSPPWNTPLLPVKKPGTNDYRPVQDLREVNKRVEDIHPTVPNPYNLLSTLPRVELPDRTWYTVLDLKDAFFCLRLHPESQPLFAFEWRDPERGLSGQLTWTRLPQGFKNSPTLFNEALHRDLADFRVQHPHEVTLTLLTTLLQYVDDLLLAAATKEDCLQGTKALLQELGDLGYRASAKKAQICQKEVTYLGYTLRDGKRWLTEARKETVMQIPAVPKNPRQVVREFLGKAGFCRLFIPGFAELAAPLYPLTKEGTTPPPFTWSEEHQKLFEAIKKALLSAPALGLPDLTKPFTLFVDEKQGVAKGVLTQKLGPWKGPWKRPVAYLSKKLDPVAAAASGWPPCLRMSGWPPCLRMIAAVALLLVKDAGKLTLGQQPLTVIAPHALEAIVRQPPDDAPDRWMTNARMARMTHYQAALLLDTERERVQFGPPVALNPATLLPLPPVALPTTPPPVALEDEDPPPPPHDCRQILAETHGTRPDLTDQPPLPDADEDDPPPDADLAETHGTRPDLDADHTWYTDGSSYIYIQEGKRRAGAAVVDGNRVIWASALSLPPVIGTSAQKAELIALTQALKLAEGKKKNKVNIYTDSRYAFAEILALLEALFLATAHVHGAIYKRRGWLTSEGKEIKNKAEILALLEALFLPKRVAIIHCPGHQKGDDPVARGNRMADQVTTTTPTTVLTTTPARQAAMMGTQVLTLTTKPEPVLVLTTTTTEPTSPPTTTP

SEQ ID NO: 1115 - protein, 836 aa, synthetic construct
TLLQLEDDEYRLYEEPEQPVKPEKSPKSPPWDDTSWLLQQEFPQAAWPQAWAETGGMGLAKQQPPPPPVVIQLKATATPAVSVRQYPMSKEARQGIRPHIRRLLDQGILVPCQSPPWNTPLLPVRKPGTNDYRPVQDLREVNKRVEDIHPTVPNPYNLLSTLPRVELPDRTWYTVLDLKDAFFCLRLHPESQPLFAFEWRDPEKGQSGQLTWTRLPQGFKNSPTLFNEALHRDLADFRVQHPHEVTLTLLTTLLQYVDDLLLAAATKEDCLQGTKALLQELGDLGYRASAKKAQICQKEVTYLGYTLRDGKRWLTEARKETVMQIPAVPKTPRQVVREFLGKAGFCRLFIPGFAELAAPLYPLTKEGTTPPPFTWTEEHQKLFEAIKKALLSAPALALPDLTKPFTLFVDERQGVAKGVLTQKLGPWKGPWKRPVAYLSKKLDPVASAASGWPPCLRASGWPPCLRAIAAVALLLVKDADKLTLGQQPLTVIAPHALESIVRQPPDDAPDRWMTNARMARMTHYQAALLLDTERERVTFAPPAALNPATLLPVPPAALPPTPPPAALEDEDPPPPVHDCAQILAETTGTRPDLTDQPPLPDADEDDPPPDADLAETTGTRPDLDADLTWYTDGSSYIYIEEGKRRAGAAVVDGNRVIWASALSLPEVIGTSAQKAELIALTQALKLAEGKKKNKINIYTDSRYAFAEILALLEALFLATAHVHGAIYKQRGWLTSAGKEIKNKEEILALLEALFLPKRVAIIHCPGHQKGDDPVARGNRMADQVTTTTPTQTLTLTPAKQAAQQGTQVLTLTTKPEPVLVLLTTTEEPTSPPTTTP

SEQ ID NO: 1116 - protein, 829 aa, synthetic construct
TLLQLEDDEYRLYEEPEQPVKPEKSPKSPPWPSSSWLLQQQFPQAAWPQAWAETAGMGLAKQVPPPPPVVIQLKASATPAVSVRQYPMSKEAREGIRPHIQRLLDQGILVPCQSPPWNTPLLPVRKPGTNDYRPVQDLREVNKRVQDIHPTVPNPYNLLSSLPRVQLPERTWYTVLDLKDAFFCLRLHPNSQPLFAFEWRDPEKGQTGQLTWTRLPQGFKNSPTLFNEALHRDLANFRVQHPHQVTLTLLTTLLQYVDDLLLAAATKEDCLEGTKALLQELGDLGYRASAKKAQICQKEVTYLGYTLRGGKRWLTEARKKTVMQIPAVPTTPRQVVREFLGKAGFCRLFIPGFATLAAPLYPLTKEGTPPPPFTWTEEHQKLFDAIKKALLSAPALALPDLTKPFTLYVDERKGVARGVLTQTLGPWRGPWRRPVAYLSKKLDPVASAASGWPTCLKASGWPTCLKAIAAVALLLVKDADKLTLGQQNITVIAPHALESIVRQPPDDAPDRWMTNARMARMTHYQSSLLLTEERVTFAPPAALNPATLLPVEPAALPSTPPPAALSDSDPPPPVHDCHQILAEETGTRKDLTDQPPLPGAPEDDPPPGAPLAEETGTRKDLGAPLTWYTDGSSYIYIVEGKRRAGAAVVDGKRTIWASASSLPETIGTSAQKAELIALTQALRLAEGKKSNSINIYTDSRYAFEEILALLEALHLATAHVHGAIYKQRGWLTSAGKEIKNKEEILALLEALHLPKRVAIIHCPGHQKGNDPVARGNRMADQVGTTTPTKTLTMPAKQAAQQGTQVLTMTTKPQPVLILLTTTEKPQEPP

SEQ ID NO: 1117 - protein, 674 aa, synthetic construct
VLNLEEEYRLHEPPVKPSQNPQSWLEQFPNVWAEQAGMGLAKQVPPVVVELKADATPVSVRQYPMSKEAREGIRPHIQRLLDQGILVPCQSPWNTPLLPVRKPGTNDYRPVQDLREVNKRVQDIHPTVPNPYNLLSSLPPQRTWYTVLDLKDAFFCLRLHPNSQPLFAFEWRDPEGGQTGQLTWTRLPQGFKNSPTLFNEALHRDLANFRAQNPQVTLLQYVDDLLIAAATKQDCQEGTQRLLQELSNLGYRVSAKKAQICRREVTYLGYTLRGGKRWLTEARKKTVMMIPPPTTPRQVREFLGKAGFCRLFIPGFATLAAPLYPLTKEKVPFSWTEEHQKAFDAIKEALLSAPALALPDLTKPFTLYVDERAGVARGVLTQTLGPWRRPVAYLSKKLDPVASGWPTCLKAIAAVALLIKDADKLTLGQNVTVIAPHALESIVRQPPDRWMTNARMTHYQSLLLNERVTFAPPAVLNPATLLPVESDEPPVHRCHEILAEETGTRKDLTDQPLPGEPLTWYTDGSSFIVEGKRMAGAAVVDGKRTIWASSLPEGTSAQKAELIALTQALRLAEGKSINIYTDSRYAFATAHIHGAIYKQRGWLTSAGKDIKNKEEILALLEAIHLPKRVAIIHCPGHQKGKDPVARGNRMADRVAKQAAQGVNILTETENPQEP

SEQ ID NO: 1118 - protein, 828 aa, synthetic construct
VLLNLEEEEYRLHEEEEEPVKPEKSPKSPPWPSSSWLLSQAFPNVVWPNVWAEKAGMGLAKQVPPPPPVVVELKADATPAVSVRQYPMSKEAREGIRPHIQRLLDQGILVPCQSPPWNTPLLPVRKPGTNDYRPVQDLREVNKRVQDIHPTVPNPYNLLSSLPRVQLPERTWYTVLDLKDAFFCLRLHPNSQPLFAFEWRDPEKGQTGQLTWTRLPQGFKNSPTLFNEALHRDLASFRAQNPNQVTLTLLTTLLQYVDDLLIAAATKEDCQEGTQRLLQELGNLGYRVSAKKAQICQKEVTYLGYTLRGGKRWLTEARKKTVMQIPPVPTTPRQVVREFLGKAGFCRLFIPGFATLAAPLYPLTKEGVPPPPFTWTEEHQKLFDAIKEALLSAPALALPDLTKPFTLYVDERAGVARGVLTQTLGPWRGPWRRPVAYLSKKLDPVASAASGWPTCLKASGWPTCLKAIAAVALLLIKDADKLTLGQQNVTVIAPHALESIVRQPPDDAPDRWMTNARMARMTHYQSSLLLNEERVTFAPPAVLNPATLLPVEPAVLDSTPPPAVLSDSDAPPVVHRCSEILAEETGTRKDLTDQPPLPGAPSDDPPPGAPLAEETGTRKDLGAPSWYTDGSSFIFIVEGKRRAGAAVVDGKRTIWASASSLPETIGTSAQKAELIALTQALRLAEGKKSNSINIYTDSRYAFEEILALLEAIHLATAHIHGAIYKQRGWLTSAGKDIKNKEEILALLEAIHLPKRVAIIHCPGHQKGNDPVAKGNRMADEVGTETLTKTLTEPAKQAAQQGTRILTETTKPQPILILTETTTKPQEPP

SEQ ID NO: 1119 - protein, 645 aa, synthetic construct
EPLLAQVPDHLWSQYSNEVGQMRTHPPVKIPVKPGPCPRIRQYPLSKESVEGIRPMIESLLNQGVLVECHSPCNTPIFPVKKPGRDEYRFVQDLRAINEVVAPMTPVVPSPTTILSNIPPSMQWFTVVDLCSAFFSIPIHPDSQYLFAFTYEGHQYTWTRLPQGFIHSPTLFSQALFTDLSDVQFPGSSELCQYMDDLLIASKDKETCETDTAVMLHHLAEKGHKASQKKLQLCQPEVIYLGHILSPNTRQISPDRISAVLNMPRPHTIRQMRSFLGMVGYCRHFIMDYATRSKPLQDMLKKGTPEPFPWTEEAEEAFTDLKQALSTAPALGLPDYAKPFQLYCHERNGFAIAVLTQKHGGRHRPIAYYSTRLDAVEAGLPPCLRACAAAAFSVQTADSFVLGSPCKIYVPHAVCALLQRSRTQHLSASRFSKYELDLLSMPNLTFVRCPALNPASLLPGACDGDPHDCVAVTHMMSRPRDDLFDVPLPNPDLILFTDGSCSRNSKGKLEGGCAVVSPDGFILTGKCPGFFSAQTAELCALTQACIYAKNKSVNIYTDSRYAFGVCHDFGHLWRHRGFLTSAGTPIKNHSEVEALLEALMMPKKIAVMKCDAHTTGHDPVTRGNAAADEAAKAAAFCGPRALYVC

SEQ ID NO: 1120 - protein, 647 aa, synthetic construct
PMEQWLEQFPDQLWAQHANEMGLMKTQPPVHIQVKPAPAPRVRQYPMSKEAREGIRPMIESLLDQGILVPCHSPCNTPIFPVKKPGTNDYRMVQDLRAINEVVAPMTPVVPNPTTILSSLPPDRTWYTVIDLCNAFFCIPIHPDSQYLFAFTWRGHQYTWTRLPQGFIHSPTLFSQALHRDLADVRFPHSSVLMQYVDDLLIASKTKESCLQDTRALLQSLADKGHKASAKKAQLCQQEVVYLGHMLKGGTRHISESRKEAVMQIPRPKTKRQVREFLGMAGYCRHFIPGFAEMAKPLQDLTKEGAPEPFPWTEEQEEAFEALKQALSSAPALALPDYSKPFQLYVHERNGVAKGVLTQKHGPWKRPVAYLSTKLDAVEAGWPPCLRAVAAVALMVKEADSLVLGSPLKVYTPHAIAALLRRSRSQWMTAARMTHYEALLLSAPRITFARCAALNPASLLPGAEDGDPHDCVSITSMMSRPRPDLTDVPLPDPDLTLFTDGSSSRDLEGKRRAGAAVVSADSVIWASALPDGTSAQKAELVALTQACIYAEDKSVNIYTDSRYAFGVCHDFGHIWKHRGFLTSAGTPIKNASEIEALLEALMLPKRVAVIKCPAHQKGDDPVARGNAMADQAAKEAAMGATAALAVL

SEQ ID NO: 1121 - protein, 646 aa, synthetic construct
PLEKLLEQFPQLWAQYSNDCGLMRTIPPIHIQVKPAPPPRVRQYPMSKEAREGIRPVIEDLLDQGILVPCHSPCNTPIFPVKKPGSNDWRMVQDYRAINEVVPPMTPTVPNPTTILSSLPPDRKWFTVIDLCNAFFSIPIHPESQYLFAFTFKGRQYTWTRLPQGFCNSPTLFNQALHKDLSDVRFQGPSVLMQYVDDVLIASDTKDECLEDTRTLLQSLADKGYKVSAKKCQLCQQEVNYLGFIISGGGRHLSDSRKEAVMNIPPPKTIRQMRSFLGMCGYCRQFIPNFAEMAKPLYDLLKKGAPEPFPWTEEHEEAFEDLKQALSSAPALALPDYSKPFQLYVNERDGVASGVLTQKHGGGKRPVAYLSTKLDAVEAGFPPCERAIAAVAMAVKQADSLVMGQPIKVYTPHAVCALLQRSRDRHMTNARMTKWEALLLDAPRITFAYCPALNPASLLPGADDGDPHDCVSVISAMSRPRPDLTDVPLPDPDLTLFTDGSSFRDDEGKLRAGAAVVSDDNVIWASSLPEGTSAQYAELVALTQACQYAEDKSVNIYTDSRYAFGTCHDHGPIWKHRGFLTSAGKPIKNAEEWQALLECLMLPKRVAVIHCPGHTKGDDPVARGNAMADKVAKQAAMGATGVLQVL

SEQ ID NO: 1122 - protein, 780 aa, synthetic construct
PPDPLLTQFPDLLWDLWAQYSNDCGLMKTHPPPPPVKIPVKPSAALPPRVRQYPLSKEALEGIRPVIESLLDQGILVPCHSPPCNTPIFPVKKPGSDDYRMVQDLRAINEIVAPMTPVVPNPTTILSSLPVVALPDTTWFTVIDLSNAFFSIPIHPDSQYLFAFTYKGRQYTWTRLPQGFIHSPTLFSQALHKDLADVRLPGGSSALLLALLLQYVDDLLIASPTKESCLKDTRALLQSLADKGHKVSAKKAQLCQQEVVYLGHLLSGGTRQISPSRKEAVLNIPKVPKTIRQLLRSFLGMVGYCRQFIPDFAELAKPLQDLLKGGTPPPEPFPWTEEQEKTFEDLKQALSSAPALGLPDYSKPFQLYVHERNGFATGVLTQKHGSRKGSRKRPVAYLSTKLDAVELAEAGFPPCLRAAGFPPCLRAVAAVALSVVKQASSLVLGGSPLKVYTPHAVAALLQRSRTTARTQHLTAARLARLSKYEAALLLSTPSPHLTFARCPALNPASLLPSPCPALDGTARCPALSDGDGPPPPHDCVAITSTLSRPRPDLTDVPPLPDPDGDDGPPNPDTPTLSRPRPDLDPDLTLFTDGSSSSRGRGEQGKLEAGAAVVSPTGVILAGTLALPGVIGTSAQTAELVALTQACIYAKDKKSNSVNIYTDSRYAFGEIQALLEALLLGVVHDFGAIWKHRGFLTSAGTPIKNASEIQALLEALLLPKKVAVIKCPAHTKGKDPVARGNARADEAALTTVLATVSAKQAALLSGPAVLLTSLAPVLLTS

SEQ ID NO: 1123 - protein, 827 aa, synthetic construct
TPLLPLEEEEYRLYEEPEEPLEPEPEPLPPPLDPLPWLLEEEFPDLLWPELWAQTSNDCGLMKTQPPPPPVKIQLKPSAAPPPRVRQYPLSKEAREGIRPVIESLLDQGILVPCHSPPCNTPIFPVKKPGSNDYRMVQDLRAINKVVAPITPTVPNPTTILSSLPVVALPDRTWFTVLDLSNAFFSIPIHPESQYLFAFTYKGRQYTWTRLPQGFINSPTLFNQALHRDLADVRLPHPGESTLLLLGLLLQYVDDLLIASPTKEECLQDTKALLQSLADKGYKVSAKKAQLCQKEVTYLGYLLSGGTRQLTESRKEAVLQIPPVPKTVRQVVRSFLGMVGYCRQFIPDFAELAKPLYDLLKGGTPPPPFPWTEEQEKAFEALKQALLSAPALALPDYSKPFQLYVDERKGVAKGVLTQKHGPRKGSRKRPVAYLSTKLDAVEAAEAGFPPCLRAAGFPPCLRAVAAVALLVVKQASSLVLGQQPLKVYTPHAVAALLQRPPPTARDRHLTNARLARLSKYEAALLLDTPDPRITFARCAALNPASLLPTPCAALPGTPQSPALEDGDPPPPPHDCVAILSALSRPRPDLTDVPPLPDPDDDDPPPPDPDLPATSLPRPDLDPDLTLFTDGSSSSRSRTEEGKLRAGAAVVSGDGVIWAGALALPDTIGTSAQKAELVALTQALKYAEDKKSNSVNIYTDSRYAFAEIQALLEALLLATLHDHGAIWKHRGFLTSAGKPIKNAPEIQALLEALLLPKRVAVIHCPGHTKGEDPVARGNARADKVALTTPLKPVLLTPAKQAALLGAPAVLLTTLAPVLLTTAPPPPTP

SEQ ID NO: 1124 - protein, 848 aa, synthetic construct
TPLLQLELEYEEPEEPLDPEEEPLLLPLLDPLKLLDEGEEFPDLLWPDLWAQTSNDCGLMKTQQPPPPVKIPPPVKIPLKPTAPPPPRVRQYPLSKEAREGIRPVIEKLLDQGIIVPCHSPPCNTPIFPVKKPNGDWRMVQDLRAINKIVAPITPTSPNPTTILSSLPVVALPDRKYFTTLDLANAFFSIPIHPESQYLFAFTYKGRQYTWTRLPQGFINSPTLFNQALHKDLADVRLPHPGESTLLLLGLLLQYVDDVLIASPTKEECLEDTKALLQKLADKGYKVSAKKAQLCQKEVTYLGYLLSGGGRQLSESRKEAVLQIPPVPKTIRQLLRSFLGLVNYCRQFIPNFAELAKPLYELLKGGTPPPPFPWTEEQEKALEDLKKALLSAPALALPDYTKPFQLYVDEKEGVATGVLTQKHGPRKRVLYQKGGKRGSRKRRRPVAYLSTKLDAVELAEAGFPPCLRALGFPPCLRAIAAVALLLVKQASSLVLGQQPLKVYTPHAVVALLQRPPPTARDRHLTNARLARLSKWETALLLDTPDPRITFARCAALNPATLLPTPSAALPETPQSPALEDGDPPPPPHDCTAVLSALSRPRPDLTDVPLLPDPDDDDPPPPDPDLPATSLPRPDLDPDLTLFTDGSSSSRSRTEEGKLKAGAAVVWGEGVIWAGALPLPGLPQGTSAQKAELVALTQALKLAEDKKSVNSVNIYTDSRYAFAEIQALLEALFLPATLHDHGAIWKHRGFLTSAGKPIKNAPEIQALLALAEALLLPKKVAVIHCPGHTKGEDPVARGNARADKLALQTPLKPPLLTPAKQAALLGAKPVLLTTLPPPLLTTPPPLPTP

SEQ ID NO: 1125 - protein, 984 aa, synthetic construct
TTLQLELLLEEKREQLDQQTKLLLLKLDSLELLPEGKKKLRKLLEKYRELLWRELWAQTSNDCGLTKLHPPYPVKIPHPPVPIKIPTKPDAPPPPYVRQYPINPEAREDIQEIIDDLLDQGIIRPCNSPPCNTPIFPVKKPNGKWRMVLDYRALNKVTPPITPQSPNPQSILSTLPVVPLRGKKYFTTLDLANGFWSIPIHPEDQYKLAFTFKGRQYTWTRLPQGFCNSPALFNAALHKALKDVRVPGPGESGVGVVGGVLVYVDDVLIANDTKEEHLEELDEILEKLTEAGYKVSLKKCQLCQTEVNYLGFLISPDGRGLSPSRKEKILDIPPVPKTLKQLLRSFLGLLNYARQFIPNFAELAKPLYQLLKGGLPPPPFPWGEEQQKALEKLKEALASAPALALPDYSKPFYLYVGEKEGVASAVLYQLHGPEYQQGGKRGREKRRRPVAYLSKALSAAELAELKFSPCEKALKFSPCEKALAAVAWALLKQASNLAMGQQPILVYTPHAAVAFLQRQPLLARERKATNARLARLAKWETTLLQDPFDPRIKFAQNSTLPQNSALPTPRKGLPENEQNSRLEDGDEPPPPQDCKTTLPLLPDPEGGEEPPPEYEIPATSVPLPDLACENELTLYTDGSSSSRSRDDKEGLKAGAGIVWLETSKPSLPLLQEWGFPLGDQSAQYAEIAAILKALKLALDKKDLPGVKGVVICTDSNYAACLLLLSFNEHLPIWKQKGFLTSAGKPIKHTWALADCLLLKTELWTAADCLVVKHDWKAIADCLLLKKDIAVLHVPGHTRGPGPHARGNDQADKLPLLPPLKPPLLKKAKQGALGLLLVERTEGPKILEGVSAFIPPPTDRGLLLPPKSRGKLLVVPPSHRGKLLGLAHDGPGAGHKGIKETYRKLKQLAFWPPRMRKHVAKYIKGNMRKHVAKLLRGCLVCCQFNPANLAPKPPLLKKPPPPLLKKPKPVCCKLNPLAHPPLGHL

SEQ ID NO: 1126 - protein, 889 aa, synthetic construct
TDIKIDIILEEEDELLKEQEQTELLELETLDLLPEGKEKLRELLKKYRDILFREIWAKSKNDCGKLGSHYPHYEHTIRGGLHRPQFQRQYPINPEAKEEIQKVIDDLLEQGIIRKCNSPPTNSPIFPVKKPDGSWRMVLDYKALNKVTPPNQAQSINPQGTLNTLTVTPRGKKYHTTLDLANGFWSIPIAPEDQYKTAFTYQGKQYVWTRLPQGFCNSPALFNAAVREVLKDIPGVAVVGGVTVYVDDVLIANDTEEEHLELLEKILEKLSDAGFKINLKKCQLGRYEVDFLGFQISEDGRGLSDSYKEKILDIKPVPKTLKQLLQSILGLLNYARDFIPNYAELAKPLYKLLKGGKPPPFPWDSEAQEELDKLKKAIKEKRQTAARLEKRKPDTELILKIHVSPDAAAIAIKLYNEGGKKKPIAYLSYTFSKAEWTELKFSPTEKVLKFSPTEKVLATIARALLKQACDLATGQQPITVYTPHAALAYLQREPLLLRNRKATNARWARWAKWETTLLQDPDPRIEFEYDATPDPSLPEPRNGLEENEQDPRLPKGKELEKKLPLPPYEGGEEEKQPYEEYELTFYTDGSSSSKSKKPDKLKTLAYWGFPLGDHSAQYAEIAAILKALLKALDKKRKPGVKPVVIVTDSNYVAKAQSFNEDLPIWEQNGFVNSKGKPLKHVADCKKLKVELWKIADCLVVKHDWKSIADCKKLKLDIHVLHQPGHTPEEGPHAKGNDEADKLPLLPPPLPPLLQLAKQGALPKTDRGKLIPPEARGKLLVPPEDRGKLLKLAHDGPGLGHLGTKPTYKKLQKKYWWPPNMRKDVSKLLRDNMRKDVQKLLKDCEVCGKYNAGNIGPKPPLLQLPPPPLLQQLLVCGKVNSGAHEPLGHL

SEQ ID NO: 1127 - protein, 680 aa, synthetic construct
VDIEEQKEQLIDESNLSKDRLRKLLDKYRALWAKWENDCGHRRIRPHHTVTGGMHRPQRQYHINPKAKPEIEKVINDLMKQGVIRQQNSVMNSPIYAVKKPDGSWRMVLDYKALNKCTPPNRAQNINSQGTLNTLYRGKYKTTIDLANGFWSIPITPEDQWKTAFTWQGKQYCWTRLPQGFCNSPAIFQAAVMDILKDIPVTVYVDDVYISNDTEEEHLEVLDKIFEKLQDAGFKINLKKSQIGRYTVDFLGFQITEEGRGLSDSFKEKLMNIKPPTTRKELQSILGLLNFARDFVPNYSEYAKPLYQLIKKEPFPWDTEHQKCLEDLKSAINSAENLEERKPDTDLIMKVNCSPTAGYIRYYNEGGKKPIKYISYVFSKTEKKFTPMEKLLATMHRALLKACDLAMGQPIHVYTPYVSMTKIQKEPLENRKALSCRWMKWESYLEDPRIEFHYDKTPDTDTGDPPSQYEWCFYTDGSAIKSSAWWGFVQDPDGKIVHRWKGPLGDHTAQYAEIAAVEFALMKMMKRITGPCLIVTDSNYVAKSYNEELPFWESNGFVNNKGKPLKHIDKWKSIADCLKLPDITVIHEPGHQPEDSPHAQGNNEVDKYVTQRSYTKEDRPKLVKQAHDGLGHAGREATLKKLQNKYWWIPNMRKDVQRFLRDCKVCMKTNSGPRPDMVQP

SEQ ID NO: 1128 - protein, 968 aa, synthetic construct
TIIKIDIIQEKDKQQEQQEQQQLLHESLNLSSEGKKRLKKLFDKYDALLWDALWQKWENQVGHRRITPHKIATGTLKPPRPQKQYHINPKAKADIQIVIDDLLKQGVLKQQNSPMNTPVYPVPKPDGRWRMVLDYRAVNKVTPAIATQNCHSASILNTLYVTPLRGGKYKTTLDLANGFWAHPIQPEDQWITAFTWNGKQYVWTTLPQGFLNSPALFTADVVDLLKDIPNVNVNNVQVYVDDVYISNDTEEEHLETLDLIFQKLQTAGYIVSLKKSKLGQHTVDFLGFQITQTGRGLTDSYKEKLLDITPVPNTLKQLLQSILGLLNFARNFIPNFSELVAPLYQLIPKAKGNYYYYIPWETEHTTKLQKIIKALEQRNAAENLEQRKPDVELIVKVHVSPTAGYYIRFYNKGGKKKPIAYHNVVFSKTELELKFTPTEKVLKFTPTEKVMTTIHKALLLKALDLAMGQQPIHVYSPIASMTKIQKTPLLHTERKALSIRWIRWLKWQTTYFEDPDPRIKFHYDATLPDLQDATLNLPQPQTDNTLNEQEYDPTLGTGNEVDIILPLSEYEGGNEVDIQYEEYEAVFYTDGSAIKSPKPKPDKQHSAGMGIIQARFEEPEFNIIHEWSIPLGDHTAQYAEIAAFEFALKKAIRIMGPGVLIVTDSNYVAKKLKSYNEELPFWESNGFVNNKKKPLKHVCKKLKVSKWSIADCKKLKAWKSIADCKKLKADIHVIHEPGHQPDQSSPHAQGNNLADKLPPKPPPKPPLVQEAVQGSYTVFSVQTKKPSLDAELEQLLDKQNTPNPKGYPSKYEYTLRDGQCYVKRTTEGEKIYTVKIIPPKDDRVKLYPPKDRVKLLIIPPKDRVKLLELAHDGPGSGHLGRNAMLLKLQNKYWWPPNMRKDVSKYIRTNMRKDVSKYIRTCTVCIITNSTNLKPKPPLVQPPPPPLVQQPEEVCVKTNELAHPPLGHL

SEQ ID NO: 1129 - protein, 766 aa, synthetic construct
TVLVPLQEYQERLLKQTALPEEQKEMLQKLFLKYDALWQHWENQVGHRRIKPHHIATGTVAPRPQKQYPINPKAKPSIQIVINDLLKQGVLIQQNSTMNTPVYPVPKPDGKWRMVLDYREVNKTIPLIAAQNQHSAGILSSIYRGKYKTTLDLSNGFWAHPITPESYWLTAFTWQGKQYCWTRLPQGFLNSPALFTADVVDLLKEIPNVQAYVDDIYISHDDPQEHLEQLEKVFSILLNAGYVVSLKKSEIAQREVEFLGFNITKEGRGLTDTFKQKLLNITPPKDLKQLQSILGLLNFARNFIPNFSELVKPLYTIVANANGKFITWTEENSNQLQHIISVLNQAENLEERNPETRLIIKVNSSPSAGYIRFYNEGSKRPIMYVNYVFSKAEVKFTQTEKLLTTMHKGLIKAMDLAMGQEILVYSPIVSMTKIQKTPLPERKALPVRWITWMTYLEDPRIQFHYDKTLPELQQIPNVTEDVIAKTKHPSEFSMVFYTDGSAIKHPDINKSHSAGMGIAQVQFQPEYKVIHQWSIPLGDHTAQLAEIAAVEFACKKALKISGPVLIVTDSFYVAESANKELPYWQSNGFLNNKKKPLKHVSKWKSIAECLQLKPDIVIIHEKGHQPTMTTFHTEGNNLADKLATQGSYVVHCNTTPSLDAELDQLLQGHYPKGYPKQYKYTLEDNKIIVERPNGIRIVPPKADREKIISQAHNIAHTGRDSTFLKVSSKYWWPNLRKDVVKVIRQCKQCLVTNAANLTAPPILRPE

SEQ ID NO: 1130 - protein, 954 aa, synthetic construct
TTILVPLLEQQEPTYQEYQERQQILKQTALPEEYKKQLQTLFLKYDTLLWDTLWQHWENQVGHRKIRPHNIATGTYPPPRPQKQYPINPKAKPSIQIVIDDLLKQGVLIQQNSTTMNTPVYPVPKPDGRWRMVLDYREVNKTIPLIAAQNQHSAGILATIYTIPRGGKYKTTLDLANGFWAHPITPESYWLTAFTWQGKQYCWTRLPQGFLNSPALFTADVVDLLKEIPNVNINNVQVYVDDIYISHDDPQEHLEQLEKVFQILLDAGYVVSLKKSEIAQKTVEFLGFNITKEGRGLTDTFKEKLLNITPVPKDLKQLLQSILGLLNFARNFIPNFSELVKPLYSLISSAKGKKYISWSEENTKSLQQIISALEERNNADNLEERKPETRLIIKVNSSPSAGYIYIRYYNEGGKKKPIMYINYVFSKAELELKFTMLEKLLKFTMLEKLLTTMHKALLIKAMDLAMGQQEILVYSPIVSMTKIQKTPLLEPERKALPIRWIRWITWMTTYLEDPDPRIQFHYDKTLPELKDKTLNIPKPDVDKTILRPEYDKTLYTDNISKVVQYSTDNIAKVKHPSQYSYSMVFYTDGSAIKSPFPDPTKSHSAGMGIVQAKFNNPEFQVINQWSIPLGDHTAQLAEIAAVEFACKKALKITGPGVLIITDSFYVALSESANKELPYWKSNGFVNNKKKPLKHVECLSLKVSKWSIAECLSLKPWKSIAECLSLKPDITIIHEKGHQPTNTSIHTEGNALADKLTSGPESGPILRPEATQGSYVVNNNTKKKPSLDAELDQLLQGHYPKGYPKQYTYTLEDGKVIVSRPPEGTKIYVIIPPKADRQKIYVPQDQKIVIPPADRQKIVSQAHNLAHTGREATLLKIANKYWWPPNMRKDVVKVLRQNMRKDVVKVLRQCQQCLVTNASNLTSGPILRPEPIPILRPPEQCLVINSQAHPILRPE

SEQ ID NO: 1131 - protein, 766 aa, synthetic construct
TVKVPIQEYKERIIKQANIPKEHKQQLQKLLDKYDTLWQHWENQVGHRKITPHNIATGTCPPRPQKQYHINPKAKPSIQIVIDDLLKQGVLIQQNSVMNTPVYPVPKPDGRWRMVLDYREVNKTIPLIAAQNQHSAGILTNLVRQKYKTTIDLSNGFWAHPITPDSYWITAFTWEGKQYCWTRLPQGFLNSPALFTADVVDLLKEIPNVQVYVDDIYISHEDPQEHLQVLDKIFQKLLDAGYVVSLKKSEIARYEVEFLGFNITKEGRGLTEEFKEKLQNITPPKTLKQLQSILGLLNFARNFIPNFSELVKPLYQLISTAKGNNISWSNEHTKQLQELISALNHADNLEERNGETRLIIKVNASPSAGYIRYYNEGGKKPIMYVNYVFSKAEQKFTPLEKLLVTMHKALIKAMDLAMGQEIEVYSPIVSMTKIQKTPLPERKALPIRWITWMTYLEDPRITFHYDKTLPELKNVPEVQEDDIPTMKHPSQYSAVFYTDGSAIKSPDPTKSHSAGMGIVQAIFNPEFQIKHQWSIPLGDHTAQYAEIAAVEFACKKALQITGPVLIITDSFYVAESANKELPYWRSNGFVNNKKKPLKHVSKWKSISDCLQLKPDITIVHEKGHQPSHTSIHTEGNALADKLATQGSYTVNNITKPSLDAELDQILQGNFPKGYPKQYKYFLEDGNVIVMRPEGDKIIPPKSDRPKLVSQAHELAHTGREATLLKLQNQYWWPNMRKDVVKCLRQCKQCLVTNSSNLTSGPIMRPE

SEQ ID NO: 1132 - protein, 766 aa, synthetic construct
TIKIDIEEQKETLINQSNLSKEGKKQLKKLFDKYDALWQHWENQVGHRRITPHNIATGTVKPRPQKQYHINPKAKPDIQIVIDDLLKQGVLKQQNSVMNTPVYPVPKPDGRWRMVLDYRAVNKVTPLIAAQNQHSAGILNTLYRGKYKTTLDLANGFWAHPITPEDYWITAFTWQGKQYCWTVLPQGFLNSPALFTADVVDLLKEIPNVQVYVDDVYISHDTEQEHLEVLDKIFQKLQEAGYIVSLKKSNIAQHTVEFLGFNITQEGRGLTDSFKEKLMNITPPTTLKQLQSILGLLNFARNFIPNFSELIAPLYQLIPKAKGNYIPWTTEHTTQLQQIISALNHAENLEERKPDVELIMKVNASPTAGYIRYYNEGGKKPIAYVNYVFSKTELKFTPLEKLLTTMHKALIKAMDLAMGQEIHVYSPIVSMTKIQKTPLTERKALSIRWITWMTYLEDPRIKFHYDKTLPDLKNLPETDTGDEITMLHPSQYEAVFYTDGSAIKSPDPNKTHSAGMGIVQAKFDPEFQIVHQWSIPLGDHTAQYAEIAAFEFACKKALKITGPVLIVTDSNYVAKSYNEELPFWRSNGFVNNKKKPLKHISKWKSIADCKQLKPDITVIHEPGHQPSNTSPHAQGNALADKLAVQGSYTVNNIQKPSLDAELDQVLQGNFPKGYPKQYEYFLKDGQCYVERPEGWKIIPPKSDRVKLVKQAHELAHTGREAMLLKLQNKYWWPNMRKDVSRYIRTCKVCLMTNSTNLKPRPPMVQE

SEQ ID NO: 1133 - protein, 969 aa, synthetic construct
TIIKLPIIEQQEPKYKEYKETKQLLKLQSQTLSKEEKKQLKKLLDKYDALLWDALWQHWENQVGHRRITPHNIATGTVKPPRPQKQYHINPKAKPSIQIVIDDLLKQGVLKQQNSVVMNTPVYPVPKPDGRWRMVLDYRAVNKTIPLIAAQNQHSAGILTTLYTIPLRGGKYKTTLDLANGFWAHPITPESYWITAFTWQGKQYCWTRLPQGFLNSPALFTADVVDLLKEIPNVNINNVQVYVDDIYISHDTPQEHLEVLDKIFQKLLEAGYIVSLKKSNLAQHTVEFLGFNITKEGRGLTDSFKEKLLNITPVPKTLKQLLQSILGLLNFARNFIPNFSELVKPLYQLISTAKGNNYYYISWTSEHTKSLQQIISALKEERNNADNLEERKPDTKLIIKVNASPTAGYIYIRYYNEGGKKKPIAYVNYVFSKTELTELKFTPLEKLLKFTPLEKLLTTMHKALLIKALDLAMGQQEIHVYSPIVSMTKIQKTPLLHPERKALSIRWIRWITWLTTYLEDPDPRITFHYDKTLPDLKDKTNVPKPETDKTLNDQKYDKTLQTDNITKIILPLTQYETDNITKTKHPSQYEQYEAVFYTDGSAIKSPFPDPTKSHSAGMGIVQAKFENPEFQIVHQWSIPLGDHTAQYAEIAAVEFACKKALKITGPGVLIVTDSNYVALQLKSANEELPFWRSNGFVNNKKKPLKHIDCLQLKISKWSIADCLQLKPDWKSIADCLQLKPDITIIHEPGHQPSNTSIHTQGNALADKLTPQPPPTPPLRQAAVQGSYTVNNITKKKPSLDAELDQILQGNFPKGYPKQYKYTLKDGKVIVQRPPEGTKIYTGIIPPKSDRPKLYPPKDPKLVPPKDRPKLVKQAHELAHTGREATLLKLQNKYWWPPNMRKDVVKVLRTNMRKDVVKVLRTCKPCLVTNSSNLTPTPPLLTPPPPPLRQTPAAQCLKTNLTAHPPLAHT

SEQ ID NO: 1134 - protein, 205 aa, synthetic construct
GKPVFAPSELGRQIGQEIKEQVEAAYQFDPIYYHLREGGHVAALHDHRPHRYFARIDIERFFYSISRNRVQRALRSIGIAKAEYYAKWSTVKNPYEQPRYALPYGFVQSPILATLVLMRSAVGEYLRGLPDDVTVSVYMDDIALSSDDLEALQAAYDGLLAALAEAGFAINDDKLRPPAEAIDIFNCDLSQGMTTVREERIDEFF

SEQ ID NO: 1135 - protein, 206 aa, synthetic construct
GKWIFVPNDECERRGRRIIEFCKDRLEFPDYFYHYRNGGHVAALHAHLENRFFFRIDLQNFYYSIARNRVTRALRGWGYPDARTFAKWSCVRNPYAGPKYTLPIGFVQSPLLASLVLMKSPIMEAIEEAMAEGVCISVYLDDFIGSSTDEAVLQSAYEDILDACAAANFIVNPTKLVPPSDAITAFNCDLTHGAAEVTTDRIAKFL

SEQ ID NO: 1136 - protein, 206 aa, synthetic construct
KNGKPVFAPSPLGREIGEDIKEQVEEAYQFDPFVYHFREGGHVAALHSHRQNQYFCRVDIERFFYSIGRNRVQRALRDIGIPRAEHYAKWSTVKNPYDQPSYALPYGFVQSPILATLVLMESAVGEYLRGLPDDITVSVYMDDICLSSDDLERLEVAFNGLLAALAEAGFQINDDKTRPPGPAMDIFNCDLENGETVVREERIDEF

SEQ ID NO: 1137 - protein, 206 aa, synthetic construct
GKWVFVPNDECRRRGRRITEYCEKRWEFPDYYYHYRDGGHVAALHAHLDNKFFFHIDLQNFFYSISRNRVTRALKGFGYREARTFATWSCVRNPYPGPRYTLPFGFVQSPILASLVLMQSPLGEAIRELTKDGVTVSVYMDDIIGSSDDEELLEEAYEEILEACEKAGFPVNEEKTQPPADAITAFNCDLTHGCMEVTEERMAEFY

SEQ ID NO: 1138 - protein, 243 aa, synthetic construct
KRWEHRFEVKPGRWVFVPTPDARATGERIRKSVEKHWTPPAFYYHLRQGGHVAALRCHEDSTYFFRCDLDDFFGRINQSRVTRCLKGWFSYAEAREMASESVVIRPGSTETMLPYGFVQSPILASLALDRSRVGAYLRKCSANEGLTVSVYMDDIVISSDDEGLLGTVAGELGQAAVDAGFPLSPGKTQGPATCVTAFNVELSHNSMVVTDERMAEFREAFAMANNAVAMGILGYVASVNPAQ

SEQ ID NO: 1139 - protein, 238 aa, synthetic construct
RWEHRFELKPGRWVYVPTEEAREHGKEIKKQIEKRWKPPAYYYHLREGGHVAALRCHQDNPYFAHVDLERFFGQISRSRVTRALKGFFSYEEAREMACESTVRHPPRFMLPFGFVQSPILASLVLDQSALGRCLRQLNDGITVTVYMDDIVISSNDEEMLEEAADELKQACEKAGFPLNEEKTQGPATKITAFNIELSHNCMEITEERMAEFHEAIRQGNEHQTEGILGYVGSVNPAQ

SEQ ID NO: 1140 - protein, 242 aa, synthetic construct
RWEHRFELKPGRWVFVPTEEAREQGKEIKKQVEKRWKPPAYYYHLRQGGHVAALRCHLDNPWFAHVDLEDFFGQINRSRVTRALKGFFSYEEAWEMACESTVRRPPDSEFMLPYGFVQSPILASLALDKSALGRYLRQLNKNDGLTVSVYMDDIVISGDDEEMLEQAFDELKQAAEKSGFPLNEEKTQGPASQITAFNIELSHNSMEITEERMAEFQEAYRQGNEHQKEGILGYVGSVNPAQ

SEQ ID NO: 1141 - protein, 245 aa, synthetic construct
KWESRFELKPGKWVFVPTDETIEQGREIKELIEKRWKAPSYYYHLRQGGHVAALKQHLGHTCFIHVDIEDFFGSINRSRITRALKGYFSYEEAREIATESTVRHPEDAERYILPFGFVQSPILASLCLRKSALGRYLHQLSKQDGVVVSVYVDDIIISGNDPERLEQVLEDIKAAAERSGFPLNEEKQQGPAETITAFNIELSQNSLEITPERMAEFRDAMQQSTNEHQREGILGYVRSVNPAQA

SEQ ID NO: 1142 - protein, 242 aa, synthetic construct
RWTHRFEIKPGRWVFVPTPEAREQGKQIKKQIEKRWKPPAYYYHLRQGGHVAALRCHLDNQYFLHVDIEDFFGSINRSRVTRCLKGYFSYEEAREMATESTVRHPGDSEYMLPYGFVQSPILASLCLHKSALGRYLRQLNKQDGITVSVYMDDIVISSNDEELLEQVFDELKQAAEKSGFPLNEEKTQGPATCITAFNIELSHNSMEITPERMAEFHEAYQQSNDHQREGILGYVRSVNPAQ

SEQ ID NO: 1143 - protein, 246 aa, synthetic construct
WSNRFEIKPGRWVYNPTTECRKHGRQIIKQLRKKWKKPDYYYHLRDGGHVEALKIHLENQYFATLDISDFFGSISRSRVTRALKPIIGYERARKIAKLSTVKQCGNYPHSHSLPYGFVQSPLLASICLHDSTLGKCLDTCHENENVTVSVYMDDIVISSNDEELLKHWYDELKVAAEKSKFVLNEEKTNPAATQTEAFNIEITHNEMKIEEERFAKFHHAYSMSESEHQRKGIGSYVGTVNKQQAK

SEQ ID NO: 1144 - protein, 245 aa, synthetic construct
RWTHKFELKPGRWVFVPTDEAREHGREIKEQIRKRWKPPDYYYHLRDGGHVEALKQHLGNQYFVHLDIKDFFGSISRSRITRALKPFFSYEKAREIAKESTVRHPEDSERYILPYGFVQSPLLASICLHKSALGKCLHQLNKQDGITVSVYMDDIIISGNDPEMLEQAFEELKQAAEKSNFELNEEKEQGPSDKITAFNIELSHNSMEITPERMAEFQEAYQQSDNEHQREGILGYVRSVNPAQA

SEQ ID NO: 1145 - protein, 246 aa, synthetic construct
WTHKFEIKPGRWVYVPTEECRKHGRQILNHIRKKWKPPLYYYHLRDGGHVEALKIHLENDYFATIDIKDFFQSTSRSRVTRALKPFFGYEKAREIAKLSTVKNPTNHPHSHVLPYGFVQSPILATICLHKSYLGNLLDTLHKSEDVTISVYMDDIIISSNDEELLEQTYDELMEAAEKSKYQLNEEKTQPPSTKITVFNIELSHNDMKITEERMVEFLIAYTKSDSEHQRKGIGSYVGTVNKEQAK

SEQ ID NO: 1146 - protein, 249 aa, synthetic construct
RWLSRFKLKPGTWVFVPTPETIERGKQIKKLIEKKWQAPAYYYHCRKGGHVRAIKQHLGHKYFCHVDIKNFFNSINRSRVTRCLKEYFGYEKAREIAMESTVRLPEDTDTPYILPFGFVQSPIIASVCLRKSALGRCLHELHQQPGVEVSVYVDDIIISGNNLEELEQELEKIKAAAERSGWPLNEQKQQGPSECITAFNIRLSQNSLDITPERMGEFVNTYHQATNDHQKEGILNYVRSVNPAQATMF

SEQ ID NO: 1147 - protein, 251 aa, synthetic construct
DKWQHKFEIKEDRWVYVPTEEMLEFGKKLHNYIRQKWTSPLYFYHLRDGGHVAAAKKHINNEYFALIDIKNFFESTSQSRVTRELKKIIPYNDAREIAKLSTVRNPMAQGTKYVIPYGYPQSPILATLCLHKSYCGGLINSINKSGNVTVSVYMDDIILSGNDLSVLNQAFDLLCEALKKSGYEMNENKTQSPSKKIKVFNLELSHNSLRVSPQRIVEFLQAYVKSDNPHERKGIASYVGSVNAEQAKLFR

SEQ ID NO: 1148 - protein, 247 aa, synthetic construct
RWTHKFEIKPGRWVYVPTEECRKYGRQILKHLRKKWKPPEYYYHLRDGGHVEALKIHLENQYFAHLDIKDFFGSISRSRVTRALKPFFGYEKAREIAKMSTVKNPNNHPHSHMLPYGFVQSPLLASICLHKSYLGNLLRKLHKNGDIKISVYMDDIVISSNDEELLQQAYDELKQAAEKSHFQLNEQKEQPPSTKITAFNIEISHNSMKITEERMVEFHEDYTKSDNEHQRKGIGSYVRSVNPEQAK

SEQ ID NO: 1149 - protein, 251 aa, synthetic construct
DKWKHKFELKENRWVYVPSEEMLKFGKKIHQYIRHKWKYPLYMYHLRDGGHVAAAKLHIKNDYFSLIDISDFFGSTSQSRVTRELKKLIPYAKAREIAKLSTVRIPNANGLKHAIPYGYPQSPILATLCFHNSYCGGVINTINKSGHVTVSVYMDDIILSSDDLAQLNQAFDTVCEALRKSRYEVNENKTQSPSTMINVFNLELSHNSLRVSPERMVQFIQAYVKSDNEHERKGIASYVHSVNPDQARLHF

SEQ ID NO: 1150 - protein, 247 aa, synthetic construct
RWEHKFEIKPDRWVYVPSEECREEGAKILNYIRKKWTPPLYFYHLRNGGHVEAARLHLENDYFAHIDIKQFFQSTSRSRVTRTLKEFFPYEKAREIAKFSTVRNPTNNRHKHVLPFGFVQSPILATLCLHKSYLGNLIRELNKRGDIKISVYMDDIIISSNDLEMLETTYDELCEAMEKSGYQINENKTQPPSNKITVFNIELSHNSMRVTPQRMVEFLIDYTKSDNPHEKEGIKSYVKSVNPEQAK

SEQ ID NO: 1151 - protein, 251 aa, synthetic construct
QRWEHKFEIKPGRWVYVPSEEMLKFGKKIHNYVRKKWNPPLYFYHLRDGGHVKAARLHLKNDYFAVIDIKQFFQSTSQSRVTRELKKYFPYEQAREIAKFSTVRNPNSNGHKYVIPYGYPQSPILATLCLHKSYCGGLLRRINKSGDMKLSVYMDDIIISSNDLATLQTAYDEICEAMEKSGYQMNMTKTQAPSNKIKVFNLELSHGSMRVTPQRMVEFLIDYYKSDNEHHRKGIANYVGSVNPEQAKLFR

SEQ ID NO: 1152 - protein, 256 aa, synthetic construct
TIEVQRWEHKFEIKPGVWVYVPSVEARKCGEKILQAVRNKWIPPLYFYHLRTGGHLKAARLHLKSDFFAVVDIKQFFQSTSRSRITRDLKSYFTYSQAREISKFSTVRNLSHTPHKHVLPFGFVQSPILATLCLDKSHLGSLLRRLNKHPDMKLSVYMDDVIISSNDLVQLQTAYDEILVAMEKSGYQANMIKTQAPSSLIKVFNLTLSKGVMKVTSQKMSDFLIDFYASDYEPHKIGVKNYVESVNPEQAKLLKL

SEQ ID NO: 1153 - protein, 255 aa, synthetic construct
TIEVQRWEHKFEIKPGVWVYVPSPEAVKCGGKILQAVRNHWNPPLYFYHLRTGGHLKATRLHLKNDYFAVVDIKQFFQSTSRSRITRCLNEYFTYEQAREISRYSTVRNPSSGPHKHVLPFGFVQSPILATLCLDKSYLGSLLRRLNRHGDMKLSVYMDDVIISSNDFQQLQTTYDEILQAMEKSGYQANMKKTQPPSNKIVVFNITLRHGNMKVTAQRMSDFLIDFYASNYEPHKIGVKNYVESVNPEQAKLFR

SEQ ID NO: 1154 - protein, 2114 aa, synthetic construct
MKRTADGSEFESPKKKRKVDKKYSIGLDIGTNSVGWAVITDEYKVPSKKFKVLGNTDRHSIKKNLIGALLFDSGETAEATRLKRTARRRYTRRKNRICYLQEIFSNEMAKVDDSFFHRLEESFLVEEDKKHERHPIFGNIVDEVAYHEKYPTIYHLRKKLVDSTDKADLRLIYLALAHMIKFRGHFLIEGDLNPDNSDVDKLFIQLVQTYNQLFEENPINASGVDAKAILSARLSKSRRLENLIAQLPGEKKNGLFGNLIALSLGLTPNFKSNFDLAEDAKLQLSKDTYDDDLDNLLAQIGDQYADLFLAAKNLSDAILLSDILRVNTEITKAPLSASMIKRYDEHHQDLTLLKALVRQQLPEKYKEIFFDQSKNGYAGYIDGGASQEEFYKFIKPILEKMDGTEELLVKLNREDLLRKQRTFDNGSIPHQIHLGELHAILRRQEDFYPFLKDNREKIEKILTFRIPYYVGPLARGNSRFAWMTRKSEETITPWNFEEVVDKGASAQSFIERMTNFDKNLPNEKVLPKHSLLYEYFTVYNELTKVKYVTEGMRKPAFLSGEQKKAIVDLLFKTNRKVTVKQLKEDYFKKIECFDSVEISGVEDRFNASLGTYHDLLKIIKDKDFLDNEENEDILEDIVLTLTLFEDREMIEERLKTYAHLFDDKVMKQLKRRRYTGWGRLSRKLINGIRDKQSGKTILDFLKSDGFANRNFMQLIHDDSLTFKEDIQKAQVSGQGDSLHEHIANLAGSPAIKKGILQTVKVVDELVKVMGRHKPENIVIEMARENQTTQKGQKNSRERMKRIEEGIKELGSQILKEHPVENTQLQNEKLYLYYLQNGRDMYVDQELDINRLSDYDVDAIVPQSFLKDDSIDNKVLTRSDKNRGKSDNVPSEEVVKKMKNYWRQLLNAKLITQRKFDNLTKAERGGLSELDKAGFIKRQLVETRQITKHVAQILDSRMNTKYDENDKLIREVKVITLKSKLVSDFRKDFQFYKVREINNYHHAHDAYLNAVVGTALIKKYPKLESEFVYGDYKVYDVRKMIAKSEQEIGKATAKYFFYSNIMNFFKTEITLANGEIRKRPLIETNGETGEIVWDKGRDFATVRKVLSMPQVNIVKKTEVQTGGFSKESILPKRNSDKLIARKKDWDPKKYGGFDSPTVAYSVLVVAKVEKGKSKKLKSVKELLGITIMERSSFEKNPIDFLEAKGYKEVKKDLIIKLPKYSLFELENGRKRMLASAGELQKGNELALPSKYVNFLYLASHYEKLKGSPEDNEQKQLFVEQHKHYLDEIIEQISEFSKRVILADANLDKVLSAYNKHRDKPIREQAENIIHLFTLTNLGAPAAFKYFDTTIDRKRYTSTKEVLDATLIHQSITGLYETRIDLSQLGGDSGGSSGGSSGSETPGTSESATPESSGGSSGGSSTLQLEDEYRLFEPETTQSQMDVWLQDFPQAWAETGGMGRAHCQAPIIIQLKATATPVSIKQYPMSHEAYMGIKPHIRRMLDQGILRPCRSPWNTPLLPVKKPGTQDYRPVQDLREVNKRVEDIHPTVPNPYNLLSTLPPSHTWYTVLDLKDAFFCLRLHPESQELFAFEWRDPEMGISGQLTWTRLPQGFKNSPTLFNEALHRDLADFRVQHPELVLLQYVDDLLLAATTKTACIQGTKHLLQTLGDKGYRASAKKAQICQTQVTYLGYILRDGQRWLTPARKETVMHIPPPRNPRQVREFLGKAGFCRLFIPGFAEMAAPLYPLTKEGTLFQWGTEHQLAFEDIKKALLSSPALGLPDITKPFELFIDEKQGYAKGVLTQKLGPWKRPVAYLSKKLDPVAAGWPPCLRMMAAIAMLVKDAGKLTLGQPLTIITPHAVEAIVRQPPDRWISNARMTHYQAMLLDTDRVQFGPVVTLNPATLLPLPEEGEHHDCRQILAETHGTRPDLTDQPLPDADHTWYTDGSSYIDNGERKAGAAVTTEHEVIWAQALPPGTSAQRAELIALTQALKMAEGKKLNVYTDSRYAFATAHVHGEIYRRRGWLTSEGKEIKNKSEIIALLKALFLPKRLSIIHCPGHQKGDSPEARGNRLADQVAREAAMETTPTLTTLPEEDSHSGGSKRTADGSEFEPKKKRKV

SEQ ID NO: 1155 - protein, 2116 aa, synthetic construct
MKRTADGSEFESPKKKRKVDKKYSIGLDIGTNSVGWAVITDEYKVPSKKFKVLGNTDRHSIKKNLIGALLFDSGETAEATRLKRTARRRYTRRKNRICYLQEIFSNEMAKVDDSFFHRLEESFLVEEDKKHERHPIFGNIVDEVAYHEKYPTIYHLRKKLVDSTDKADLRLIYLALAHMIKFRGHFLIEGDLNPDNSDVDKLFIQLVQTYNQLFEENPINASGVDAKAILSARLSKSRRLENLIAQLPGEKKNGLFGNLIALSLGLTPNFKSNFDLAEDAKLQLSKDTYDDDLDNLLAQIGDQYADLFLAAKNLSDAILLSDILRVNTEITKAPLSASMIKRYDEHHQDLTLLKALVRQQLPEKYKEIFFDQSKNGYAGYIDGGASQEEFYKFIKPILEKMDGTEELLVKLNREDLLRKQRTFDNGSIPHQIHLGELHAILRRQEDFYPFLKDNREKIEKILTFRIPYYVGPLARGNSRFAWMTRKSEETITPWNFEEVVDKGASAQSFIERMTNFDKNLPNEKVLPKHSLLYEYFTVYNELTKVKYVTEGMRKPAFLSGEQKKAIVDLLFKTNRKVTVKQLKEDYFKKIECFDSVEISGVEDRFNASLGTYHDLLKIIKDKDFLDNEENEDILEDIVLTLTLFEDREMIEERLKTYAHLFDDKVMKQLKRRRYTGWGRLSRKLINGIRDKQSGKTILDFLKSDGFANRNFMQLIHDDSLTFKEDIQKAQVSGQGDSLHEHIANLAGSPAIKKGILQTVKVVDELVKVMGRHKPENIVIEMARENQTTQKGQKNSRERMKRIEEGIKELGSQILKEHPVENTQLQNEKLYLYYLQNGRDMYVDQELDINRLSDYDVDAIVPQSFLKDDSIDNKVLTRSDKNRGKSDNVPSEEVVKKMKNYWRQLLNAKLITQRKFDNLTKAERGGLSELDKAGFIKRQLVETRQITKHVAQILDSRMNTKYDENDKLIREVKVITLKSKLVSDFRKDFQFYKVREINNYHHAHDAYLNAVVGTALIKKYPKLESEFVYGDYKVYDVRKMIAKSEQEIGKATAKYFFYSNIMNFFKTEITLANGEIRKRPLIETNGETGEIVWDKGRDFATVRKVLSMPQVNIVKKTEVQTGGFSKESILPKRNSDKLIARKKDWDPKKYGGFDSPTVAYSVLVVAKVEKGKSKKLKSVKELLGITIMERSSFEKNPIDFLEAKGYKEVKKDLIIKLPKYSLFELENGRKRMLASAGELQKGNELALPSKYVNFLYLASHYEKLKGSPEDNEQKQLFVEQHKHYLDEIIEQISEFSKRVILADANLDKVLSAYNKHRDKPIREQAENIIHLFTLTNLGAPAAFKYFDTTIDRKRYTSTKEVLDATLIHQSITGLYETRIDLSQLGGDSGGSSGGSSGSETPGTSESATPESSGGSSGGSSTLQLEDEYRLYEPPVKPSQEPDSWLQDFPQAWAETGGMGLAKCQPPVIIQLKATATPVSIRQYPMSKEAREGIRPHIQRLLDQGILVPCQSPWNTPLLPVKKPGTNDYRPVQDLREVNKRVQDIHPTVPNPYNLLSTLPPSRTWYTVLDLKDAFFCLRLHPQSQPLFAFEWRDPEMGISGQLTWTRLPQGFKNSPTLFNEALHRDLADFRVQHPQVTLLQYVDDLLLAAATKQDCQEGTKALLQELGNLGYRASAKKAQICQKEVTYLGYQLRGGKRWLTEARKETVMQIPPPTNPRQVREFLGKAGFCRLFIPGFAELAAPLYPLTKEGTPFTWSEEHQKAFDAIKKALLSAPALGLPDITKPFTLFVDERQGVARGVLTQKLGPWRRPVAYLSKKLDPVASGWPPCLRMIAAVAMLVKDADKLTLGQNLTVIAPHALEAIVRQPPDRWMTNARMTHYQSLLLDTERVQFGPPVALNPATLLPLEEDEPPTHDCHQILAEEHGTRKDLTDQPLPDADHTWYTDGSSFIVEGKRRAGAAVVDGTRTIWASSLPEGTSAQKAELIALTQALRMAEGKKINIYTDSRYAFATAHVHGAIYKRRGWLTSEGKEIKNKEEILALLEALFLPKRVAIIHCPGHQKGNDPVARGNRMADQVARQAAMGTTPTLTVLPEEESSSGGSKRTADGSEFEPKKKRKV

SEQ ID NO: 1156 - protein, 2114 aa, synthetic construct
MKRTADGSEFESPKKKRKVDKKYSIGLDIGTNSVGWAVITDEYKVPSKKFKVLGNTDRHSIKKNLIGALLFDSGETAEATRLKRTARRRYTRRKNRICYLQEIFSNEMAKVDDSFFHRLEESFLVEEDKKHERHPIFGNIVDEVAYHEKYPTIYHLRKKLVDSTDKADLRLIYLALAHMIKFRGHFLIEGDLNPDNSDVDKLFIQLVQTYNQLFEENPINASGVDAKAILSARLSKSRRLENLIAQLPGEKKNGLFGNLIALSLGLTPNFKSNFDLAEDAKLQLSKDTYDDDLDNLLAQIGDQYADLFLAAKNLSDAILLSDILRVNTEITKAPLSASMIKRYDEHHQDLTLLKALVRQQLPEKYKEIFFDQSKNGYAGYIDGGASQEEFYKFIKPILEKMDGTEELLVKLNREDLLRKQRTFDNGSIPHQIHLGELHAILRRQEDFYPFLKDNREKIEKILTFRIPYYVGPLARGNSRFAWMTRKSEETITPWNFEEVVDKGASAQSFIERMTNFDKNLPNEKVLPKHSLLYEYFTVYNELTKVKYVTEGMRKPAFLSGEQKKAIVDLLFKTNRKVTVKQLKEDYFKKIECFDSVEISGVEDRFNASLGTYHDLLKIIKDKDFLDNEENEDILEDIVLTLTLFEDREMIEERLKTYAHLFDDKVMKQLKRRRYTGWGRLSRKLINGIRDKQSGKTILDFLKSDGFANRNFMQLIHDDSLTFKEDIQKAQVSGQGDSLHEHIANLAGSPAIKKGILQTVKVVDELVKVMGRHKPENIVIEMARENQTTQKGQKNSRERMKRIEEGIKELGSQILKEHPVENTQLQNEKLYLYYLQNGRDMYVDQELDINRLSDYDVDAIVPQSFLKDDSIDNKVLTRSDKNRGKSDNVPSEEVVKKMKNYWRQLLNAKLITQRKFDNLTKAERGGLSELDKAGFIKRQLVETRQITKHVAQILDSRMNTKYDENDKLIREVKVITLKSKLVSDFRKDFQFYKVREINNYHHAHDAYLNAVVGTALIKKYPKLESEFVYGDYKVYDVRKMIAKSEQEIGKATAKYFFYSNIMNFFKTEITLANGEIRKRPLIETNGETGEIVWDKGRDFATVRKVLSMPQVNIVKKTEVQTGGFSKESILPKRNSDKLIARKKDWDPKKYGGFDSPTVAYSVLVVAKVEKGKSKKLKSVKELLGITIMERSSFEKNPIDFLEAKGYKEVKKDLIIKLPKYSLFELENGRKRMLASAGELQKGNELALPSKYVNFLYLASHYEKLKGSPEDNEQKQLFVEQHKHYLDEIIEQISEFSKRVILADANLDKVLSAYNKHRDKPIREQAENIIHLFTLTNLGAPAAFKYFDTTIDRKRYTSTKEVLDATLIHQSITGLYETRIDLSQLGGDSGGSSGGSSGSETPGTSESATPESSGGSSGGSSVLNLEEEYRLHEPPVKPSQNPQSWLEQFPNVWAEQAGMGLAKQVPPVVVELKADATPVSVRQYPMSKEAREGIRPHIQRLLDQGILVPCQSPWNTPLLPVRKPGTNDYRPVQDLREVNKRVQDIHPTVPNPYNLLSSLPPQRTWYTVLDLKDAFFCLRLHPNSQPLFAFEWRDPEGGQTGQLTWTRLPQGFKNSPTLFNEALHRDLANFRAQNPQVTLLQYVDDLLIAAATKQDCQEGTQRLLQELSNLGYRVSAKKAQICRREVTYLGYTLRGGKRWLTEARKKTVMMIPPPTTPRQVREFLGKAGFCRLFIPGFATLAAPLYPLTKEKVPFSWTEEHQKAFDAIKEALLSAPALALPDLTKPFTLYVDERAGVARGVLTQTLGPWRRPVAYLSKKLDPVASGWPTCLKAIAAVALLIKDADKLTLGQNVTVIAPHALESIVRQPPDRWMTNARMTHYQSLLLNERVTFAPPAVLNPATLLPVESDEPPVHRCHEILAEETGTRKDLTDQPLPGEPLTWYTDGSSFIVEGKRMAGAAVVDGKRTIWASSLPEGTSAQKAELIALTQALRLAEGKSINIYTDSRYAFATAHIHGAIYKQRGWLTSAGKDIKNKEEILALLEAIHLPKRVAIIHCPGHQKGKDPVARGNRMADRVAKQAAQGVNILTETENPQEPSGGSKRTADGSEFEPKKKRKV

SEQ ID NO: 1157 - protein, 1682 aa, synthetic construct
MKRTADGSEFESPKKKRKVDKKYSIGLDIGTNSVGWAVITDEYKVPSKKFKVLGNTDRHSIKKNLIGALLFDSGETAEATRLKRTARRRYTRRKNRICYLQEIFSNEMAKVDDSFFHRLEESFLVEEDKKHERHPIFGNIVDEVAYHEKYPTIYHLRKKLVDSTDKADLRLIYLALAHMIKFRGHFLIEGDLNPDNSDVDKLFIQLVQTYNQLFEENPINASGVDAKAILSARLSKSRRLENLIAQLPGEKKNGLFGNLIALSLGLTPNFKSNFDLAEDAKLQLSKDTYDDDLDNLLAQIGDQYADLFLAAKNLSDAILLSDILRVNTEITKAPLSASMIKRYDEHHQDLTLLKALVRQQLPEKYKEIFFDQSKNGYAGYIDGGASQEEFYKFIKPILEKMDGTEELLVKLNREDLLRKQRTFDNGSIPHQIHLGELHAILRRQEDFYPFLKDNREKIEKILTFRIPYYVGPLARGNSRFAWMTRKSEETITPWNFEEVVDKGASAQSFIERMTNFDKNLPNEKVLPKHSLLYEYFTVYNELTKVKYVTEGMRKPAFLSGEQKKAIVDLLFKTNRKVTVKQLKEDYFKKIECFDSVEISGVEDRFNASLGTYHDLLKIIKDKDFLDNEENEDILEDIVLTLTLFEDREMIEERLKTYAHLFDDKVMKQLKRRRYTGWGRLSRKLINGIRDKQSGKTILDFLKSDGFANRNFMQLIHDDSLTFKEDIQKAQVSGQGDSLHEHIANLAGSPAIKKGILQTVKVVDELVKVMGRHKPENIVIEMARENQTTQKGQKNSRERMKRIEEGIKELGSQILKEHPVENTQLQNEKLYLYYLQNGRDMYVDQELDINRLSDYDVDAIVPQSFLKDDSIDNKVLTRSDKNRGKSDNVPSEEVVKKMKNYWRQLLNAKLITQRKFDNLTKAERGGLSELDKAGFIKRQLVETRQITKHVAQILDSRMNTKYDENDKLIREVKVITLKSKLVSDFRKDFQFYKVREINNYHHAHDAYLNAVVGTALIKKYPKLESEFVYGDYKVYDVRKMIAKSEQEIGKATAKYFFYSNIMNFFKTEITLANGEIRKRPLIETNGETGEIVWDKGRDFATVRKVLSMPQVNIVKKTEVQTGGFSKESILPKRNSDKLIARKKDWDPKKYGGFDSPTVAYSVLVVAKVEKGKSKKLKSVKELLGITIMERSSFEKNPIDFLEAKGYKEVKKDLIIKLPKYSLFELENGRKRMLASAGELQKGNELALPSKYVNFLYLASHYEKLKGSPEDNEQKQLFVEQHKHYLDEIIEQISEFSKRVILADANLDKVLSAYNKHRDKPIREQAENIIHLFTLTNLGAPAAFKYFDTTIDRKRYTSTKEVLDATLIHQSITGLYETRIDLSQLGGDSGGSSGGSSGSETPGTSESATPESSGGSSGGSSRWEHRFELKPGRWVFVPTEEAREQGKEIKKQVEKRWKPPAYYYHLRQGGHVAALRCHLDNPWFAHVDLEDFFGQINRSRVTRALKGFFSYEEAWEMACESTVRRPPDSEFMLPYGFVQSPILASLALDKSALGRYLRQLNKNDGLTVSVYMDDIVISGDDEEMLEQAFDELKQAAEKSGFPLNEEKTQGPASQITAFNIELSHNSMEITEERMAEFQEAYRQGNEHQKEGILGYVGSVNPAQSGGSKRTADGSEFEPKKKRKV

SEQ ID NO: 1158 - protein, 1685 aa, synthetic construct
MKRTADGSEFESPKKKRKVDKKYSIGLDIGTNSVGWAVITDEYKVPSKKFKVLGNTDRHSIKKNLIGALLFDSGETAEATRLKRTARRRYTRRKNRICYLQEIFSNEMAKVDDSFFHRLEESFLVEEDKKHERHPIFGNIVDEVAYHEKYPTIYHLRKKLVDSTDKADLRLIYLALAHMIKFRGHFLIEGDLNPDNSDVDKLFIQLVQTYNQLFEENPINASGVDAKAILSARLSKSRRLENLIAQLPGEKKNGLFGNLIALSLGLTPNFKSNFDLAEDAKLQLSKDTYDDDLDNLLAQIGDQYADLFLAAKNLSDAILLSDILRVNTEITKAPLSASMIKRYDEHHQDLTLLKALVRQQLPEKYKEIFFDQSKNGYAGYIDGGASQEEFYKFIKPILEKMDGTEELLVKLNREDLLRKQRTFDNGSIPHQIHLGELHAILRRQEDFYPFLKDNREKIEKILTFRIPYYVGPLARGNSRFAWMTRKSEETITPWNFEEVVDKGASAQSFIERMTNFDKNLPNEKVLPKHSLLYEYFTVYNELTKVKYVTEGMRKPAFLSGEQKKAIVDLLFKTNRKVTVKQLKEDYFKKIECFDSVEISGVEDRFNASLGTYHDLLKIIKDKDFLDNEENEDILEDIVLTLTLFEDREMIEERLKTYAHLFDDKVMKQLKRRRYTGWGRLSRKLINGIRDKQSGKTILDFLKSDGFANRNFMQLIHDDSLTFKEDIQKAQVSGQGDSLHEHIANLAGSPAIKKGILQTVKVVDELVKVMGRHKPENIVIEMARENQTTQKGQKNSRERMKRIEEGIKELGSQILKEHPVENTQLQNEKLYLYYLQNGRDMYVDQELDINRLSDYDVDAIVPQSFLKDDSIDNKVLTRSDKNRGKSDNVPSEEVVKKMKNYWRQLLNAKLITQRKFDNLTKAERGGLSELDKAGFIKRQLVETRQITKHVAQILDSRMNTKYDENDKLIREVKVITLKSKLVSDFRKDFQFYKVREINNYHHAHDAYLNAVVGTALIKKYPKLESEFVYGDYKVYDVRKMIAKSEQEIGKATAKYFFYSNIMNFFKTEITLANGEIRKRPLIETNGETGEIVWDKGRDFATVRKVLSMPQVNIVKKTEVQTGGFSKESILPKRNSDKLIARKKDWDPKKYGGFDSPTVAYSVLVVAKVEKGKSKKLKSVKELLGITIMERSSFEKNPIDFLEAKGYKEVKKDLIIKLPKYSLFELENGRKRMLASAGELQKGNELALPSKYVNFLYLASHYEKLKGSPEDNEQKQLFVEQHKHYLDEIIEQISEFSKRVILADANLDKVLSAYNKHRDKPIREQAENIIHLFTLTNLGAPAAFKYFDTTIDRKRYTSTKEVLDATLIHQSITGLYETRIDLSQLGGDSGGSSGGSSGSETPGTSESATPESSGGSSGGSSKWESRFELKPGKWVFVPTDETIEQGREIKELIEKRWKAPSYYYHLRQGGHVAALKQHLGHTCFIHVDIEDFFGSINRSRITRALKGYFSYEEAREIATESTVRHPEDAERYILPFGFVQSPILASLCLRKSALGRYLHQLSKQDGVVVSVYVDDIIISGNDPERLEQVLEDIKAAAERSGFPLNEEKQQGPAETITAFNIELSQNSLEITPERMAEFRDAMQQSTNEHQREGILGYVRSVNPAQASGGSKRTADGSEFEPKKKRKV

SEQ ID NO: 1159 - protein, 1682 aa, synthetic construct
MKRTADGSEFESPKKKRKVDKKYSIGLDIGTNSVGWAVITDEYKVPSKKFKVLGNTDRHSIKKNLIGALLFDSGETAEATRLKRTARRRYTRRKNRICYLQEIFSNEMAKVDDSFFHRLEESFLVEEDKKHERHPIFGNIVDEVAYHEKYPTIYHLRKKLVDSTDKADLRLIYLALAHMIKFRGHFLIEGDLNPDNSDVDKLFIQLVQTYNQLFEENPINASGVDAKAILSARLSKSRRLENLIAQLPGEKKNGLFGNLIALSLGLTPNFKSNFDLAEDAKLQLSKDTYDDDLDNLLAQIGDQYADLFLAAKNLSDAILLSDILRVNTEITKAPLSASMIKRYDEHHQDLTLLKALVRQQLPEKYKEIFFDQSKNGYAGYIDGGASQEEFYKFIKPILEKMDGTEELLVKLNREDLLRKQRTFDNGSIPHQIHLGELHAILRRQEDFYPFLKDNREKIEKILTFRIPYYVGPLARGNSRFAWMTRKSEETITPWNFEEVVDKGASAQSFIERMTNFDKNLPNEKVLPKHSLLYEYFTVYNELTKVKYVTEGMRKPAFLSGEQKKAIVDLLFKTNRKVTVKQLKEDYFKKIECFDSVEISGVEDRFNASLGTYHDLLKIIKDKDFLDNEENEDILEDIVLTLTLFEDREMIEERLKTYAHLFDDKVMKQLKRRRYTGWGRLSRKLINGIRDKQSGKTILDFLKSDGFANRNFMQLIHDDSLTFKEDIQKAQVSGQGDSLHEHIANLAGSPAIKKGILQTVKVVDELVKVMGRHKPENIVIEMARENQTTQKGQKNSRERMKRIEEGIKELGSQILKEHPVENTQLQNEKLYLYYLQNGRDMYVDQELDINRLSDYDVDAIVPQSFLKDDSIDNKVLTRSDKNRGKSDNVPSEEVVKKMKNYWRQLLNAKLITQRKFDNLTKAERGGLSELDKAGFIKRQLVETRQITKHVAQILDSRMNTKYDENDKLIREVKVITLKSKLVSDFRKDFQFYKVREINNYHHAHDAYLNAVVGTALIKKYPKLESEFVYGDYKVYDVRKMIAKSEQEIGKATAKYFFYSNIMNFFKTEITLANGEIRKRPLIETNGETGEIVWDKGRDFATVRKVLSMPQVNIVKKTEVQTGGFSKESILPKRNSDKLIARKKDWDPKKYGGFDSPTVAYSVLVVAKVEKGKSKKLKSVKELLGITIMERSSFEKNPIDFLEAKGYKEVKKDLIIKLPKYSLFELENGRKRMLASAGELQKGNELALPSKYVNFLYLASHYEKLKGSPEDNEQKQLFVEQHKHYLDEIIEQISEFSKRVILADANLDKVLSAYNKHRDKPIREQAENIIHLFTLTNLGAPAAFKYFDTTIDRKRYTSTKEVLDATLIHQSITGLYETRIDLSQLGGDSGGSSGGSSGSETPGTSESATPESSGGSSGGSSRWTHRFEIKPGRWVFVPTPEAREQGKQIKKQIEKRWKPPAYYYHLRQGGHVAALRCHLDNQYFLHVDIEDFFGSINRSRVTRCLKGYFSYEEAREMATESTVRHPGDSEYMLPYGFVQSPILASLCLHKSALGRYLRQLNKQDGITVSVYMDDIVISSNDEELLEQVFDELKQAAEKSGFPLNEEKTQGPATCITAFNIELSHNSMEITPERMAEFHEAYQQSNDHQREGILGYVRSVNPAQSGGSKRTADGSEFEPKKKRKV

SEQ ID NO: 1160 - protein, 1685 aa, synthetic construct
MKRTADGSEFESPKKKRKVDKKYSIGLDIGTNSVGWAVITDEYKVPSKKFKVLGNTDRHSIKKNLIGALLFDSGETAEATRLKRTARRRYTRRKNRICYLQEIFSNEMAKVDDSFFHRLEESFLVEEDKKHERHPIFGNIVDEVAYHEKYPTIYHLRKKLVDSTDKADLRLIYLALAHMIKFRGHFLIEGDLNPDNSDVDKLFIQLVQTYNQLFEENPINASGVDAKAILSARLSKSRRLENLIAQLPGEKKNGLFGNLIALSLGLTPNFKSNFDLAEDAKLQLSKDTYDDDLDNLLAQIGDQYADLFLAAKNLSDAILLSDILRVNTEITKAPLSASMIKRYDEHHQDLTLLKALVRQQLPEKYKEIFFDQSKNGYAGYIDGGASQEEFYKFIKPILEKMDGTEELLVKLNREDLLRKQRTFDNGSIPHQIHLGELHAILRRQEDFYPFLKDNREKIEKILTFRIPYYVGPLARGNSRFAWMTRKSEETITPWNFEEVVDKGASAQSFIERMTNFDKNLPNEKVLPKHSLLYEYFTVYNELTKVKYVTEGMRKPAFLSGEQKKAIVDLLFKTNRKVTVKQLKEDYFKKIECFDSVEISGVEDRFNASLGTYHDLLKIIKDKDFLDNEENEDILEDIVLTLTLFEDREMIEERLKTYAHLFDDKVMKQLKRRRYTGWGRLSRKLINGIRDKQSGKTILDFLKSDGFANRNFMQLIHDDSLTFKEDIQKAQVSGQGDSLHEHIANLAGSPAIKKGILQTVKVVDELVKVMGRHKPENIVIEMARENQTTQKGQKNSRERMKRIEEGIKELGSQILKEHPVENTQLQNEKLYLYYLQNGRDMYVDQELDINRLSDYDVDAIVPQSFLKDDSIDNKVLTRSDKNRGKSDNVPSEEVVKKMKNYWRQLLNAKLITQRKFDNLTKAERGGLSELDKAGFIKRQLVETRQITKHVAQILDSRMNTKYDENDKLIREVKVITLKSKLVSDFRKDFQFYKVREINNYHHAHDAYLNAVVGTALIKKYPKLESEFVYGDYKVYDVRKMIAKSEQEIGKATAKYFFYSNIMNFFKTEITLANGEIRKRPLIETNGETGEIVWDKGRDFATVRKVLSMPQVNIVKKTEVQTGGFSKESILPKRNSDKLIARKKDWDPKKYGGFDSPTVAYSVLVVAKVEKGKSKKLKSVKELLGITIMERSSFEKNPIDFLEAKGYKEVKKDLIIKLPKYSLFELENGRKRMLASAGELQKGNELALPSKYVNFLYLASHYEKLKGSPEDNEQKQLFVEQHKHYLDEIIEQISEFSKRVILADANLDKVLSAYNKHRDKPIREQAENIIHLFTLTNLGAPAAFKYFDTTIDRKRYTSTKEVLDATLIHQSITGLYETRIDLSQLGGDSGGSSGGSSGSETPGTSESATPESSGGSSGGSSRWTHKFELKPGRWVFVPTDEAREHGREIKEQIRKRWKPPDYYYHLRDGGHVEALKQHLGNQYFVHLDIKDFFGSISRSRITRALKPFFSYEKAREIAKESTVRHPEDSERYILPYGFVQSPLLASICLHKSALGKCLHQLNKQDGITVSVYMDDIIISGNDPEMLEQAFEELKQAAEKSNFELNEEKEQGPSDKITAFNIELSHNSMEITPERMAEFQEAYQQSDNEHQREGILGYVRSVNPAQASGGSKRTADGSEFEPKKKRKV

SEQ ID NO: 1161 - protein, 1686 aa, synthetic construct
MKRTADGSEFESPKKKRKVDKKYSIGLDIGTNSVGWAVITDEYKVPSKKFKVLGNTDRHSIKKNLIGALLFDSGETAEATRLKRTARRRYTRRKNRICYLQEIFSNEMAKVDDSFFHRLEESFLVEEDKKHERHPIFGNIVDEVAYHEKYPTIYHLRKKLVDSTDKADLRLIYLALAHMIKFRGHFLIEGDLNPDNSDVDKLFIQLVQTYNQLFEENPINASGVDAKAILSARLSKSRRLENLIAQLPGEKKNGLFGNLIALSLGLTPNFKSNFDLAEDAKLQLSKDTYDDDLDNLLAQIGDQYADLFLAAKNLSDAILLSDILRVNTEITKAPLSASMIKRYDEHHQDLTLLKALVRQQLPEKYKEIFFDQSKNGYAGYIDGGASQEEFYKFIKPILEKMDGTEELLVKLNREDLLRKQRTFDNGSIPHQIHLGELHAILRRQEDFYPFLKDNREKIEKILTFRIPYYVGPLARGNSRFAWMTRKSEETITPWNFEEVVDKGASAQSFIERMTNFDKNLPNEKVLPKHSLLYEYFTVYNELTKVKYVTEGMRKPAFLSGEQKKAIVDLLFKTNRKVTVKQLKEDYFKKIECFDSVEISGVEDRFNASLGTYHDLLKIIKDKDFLDNEENEDILEDIVLTLTLFEDREMIEERLKTYAHLFDDKVMKQLKRRRYTGWGRLSRKLINGIRDKQSGKTILDFLKSDGFANRNFMQLIHDDSLTFKEDIQKAQVSGQGDSLHEHIANLAGSPAIKKGILQTVKVVDELVKVMGRHKPENIVIEMARENQTTQKGQKNSRERMKRIEEGIKELGSQILKEHPVENTQLQNEKLYLYYLQNGRDMYVDQELDINRLSDYDVDAIVPQSFLKDDSIDNKVLTRSDKNRGKSDNVPSEEVVKKMKNYWRQLLNAKLITQRKFDNLTKAERGGLSELDKAGFIKRQLVETRQITKHVAQILDSRMNTKYDENDKLIREVKVITLKSKLVSDFRKDFQFYKVREINNYHHAHDAYLNAVVGTALIKKYPKLESEFVYGDYKVYDVRKMIAKSEQEIGKATAKYFFYSNIMNFFKTEITLANGEIRKRPLIETNGETGEIVWDKGRDFATVRKVLSMPQVNIVKKTEVQTGGFSKESILPKRNSDKLIARKKDWDPKKYGGFDSPTVAYSVLVVAKVEKGKSKKLKSVKELLGITIMERSSFEKNPIDFLEAKGYKEVKKDLIIKLPKYSLFELENGRKRMLASAGELQKGNELALPSKYVNFLYLASHYEKLKGSPEDNEQKQLFVEQHKHYLDEIIEQISEFSKRVILADANLDKVLSAYNKHRDKPIREQAENIIHLFTLTNLGAPAAFKYFDTTIDRKRYTSTKEVLDATLIHQSITGLYETRIDLSQLGGDSGGSSGGSSGSETPGTSESATPESSGGSSGGSSWTHKFEIKPGRWVYVPTEECRKHGRQILNHIRKKWKPPLYYYHLRDGGHVEALKIHLENDYFATIDIKDFFQSTSRSRVTRALKPFFGYEKAREIAKLSTVKNPTNHPHSHVLPYGFVQSPILATICLHKSYLGNLLDTLHKSEDVTISVYMDDIIISSNDEELLEQTYDELMEAAEKSKYQLNEEKTQPPSTKITVFNIELSHNDMKITEERMVEFLIAYTKSDSEHQRKGIGSYVGTVNKEQAKSGGSKRTADGSEFEPKKKRKV

SEQ ID NO: 1162 - protein, 1691 aa, synthetic construct
MKRTADGSEFESPKKKRKVDKKYSIGLDIGTNSVGWAVITDEYKVPSKKFKVLGNTDRHSIKKNLIGALLFDSGETAEATRLKRTARRRYTRRKNRICYLQEIFSNEMAKVDDSFFHRLEESFLVEEDKKHERHPIFGNIVDEVAYHEKYPTIYHLRKKLVDSTDKADLRLIYLALAHMIKFRGHFLIEGDLNPDNSDVDKLFIQLVQTYNQLFEENPINASGVDAKAILSARLSKSRRLENLIAQLPGEKKNGLFGNLIALSLGLTPNFKSNFDLAEDAKLQLSKDTYDDDLDNLLAQIGDQYADLFLAAKNLSDAILLSDILRVNTEITKAPLSASMIKRYDEHHQDLTLLKALVRQQLPEKYKEIFFDQSKNGYAGYIDGGASQEEFYKFIKPILEKMDGTEELLVKLNREDLLRKQRTFDNGSIPHQIHLGELHAILRRQEDFYPFLKDNREKIEKILTFRIPYYVGPLARGNSRFAWMTRKSEETITPWNFEEVVDKGASAQSFIERMTNFDKNLPNEKVLPKHSLLYEYFTVYNELTKVKYVTEGMRKPAFLSGEQKKAIVDLLFKTNRKVTVKQLKEDYFKKIECFDSVEISGVEDRFNASLGTYHDLLKIIKDKDFLDNEENEDILEDIVLTLTLFEDREMIEERLKTYAHLFDDKVMKQLKRRRYTGWGRLSRKLINGIRDKQSGKTILDFLKSDGFANRNFMQLIHDDSLTFKEDIQKAQVSGQGDSLHEHIANLAGSPAIKKGILQTVKVVDELVKVMGRHKPENIVIEMARENQTTQKGQKNSRERMKRIEEGIKELGSQILKEHPVENTQLQNEKLYLYYLQNGRDMYVDQELDINRLSDYDVDAIVPQSFLKDDSIDNKVLTRSDKNRGKSDNVPSEEVVKKMKNYWRQLLNAKLITQRKFDNLTKAERGGLSELDKAGFIKRQLVETRQITKHVAQILDSRMNTKYDENDKLIREVKVITLKSKLVSDFRKDFQFYKVREINNYHHAHDAYLNAVVGTALIKKYPKLESEFVYGDYKVYDVRKMIAKSEQEIGKATAKYFFYSNIMNFFKTEITLANGEIRKRPLIETNGETGEIVWDKGRDFATVRKVLSMPQVNIVKKTEVQTGGFSKESILPKRNSDKLIARKKDWDPKKYGGFDSPTVAYSVLVVAKVEKGKSKKLKSVKELLGITIMERSSFEKNPIDFLEAKGYKEVKKDLIIKLPKYSLFELENGRKRMLASAGELQKGNELALPSKYVNFLYLASHYEKLKGSPEDNEQKQLFVEQHKHYLDEIIEQISEFSKRVILADANLDKVLSAYNKHRDKPIREQAENIIHLFTLTNLGAPAAFKYFDTTIDRKRYTSTKEVLDATLIHQSITGLYETRIDLSQLGGDSGGSSGGSSGSETPGTSESATPESSGGSSGGSSDKWQHKFEIKEDRWVYVPTEEMLEFGKKLHNYIRQKWTSPLYFYHLRDGGHVAAAKKHINNEYFALIDIKNFFESTSQSRVTRELKKIIPYNDAREIAKLSTVRNPMAQGTKYVIPYGYPQSPILATLCLHKSYCGGLINSINKSGNVTVSVYMDDIILSGNDLSVLNQAFDLLCEALKKSGYEMNENKTQSPSKKIKVFNLELSHNSLRVSPQRIVEFLQAYVKSDNPHERKGIASYVGSVNAEQAKLFRSGGSKRTADGSEFEPKKKRKV

SEQ ID NO: 1163 - protein, 1691 aa, synthetic construct
MKRTADGSEFESPKKKRKVDKKYSIGLDIGTNSVGWAVITDEYKVPSKKFKVLGNTDRHSIKKNLIGALLFDSGETAEATRLKRTARRRYTRRKNRICYLQEIFSNEMAKVDDSFFHRLEESFLVEEDKKHERHPIFGNIVDEVAYHEKYPTIYHLRKKLVDSTDKADLRLIYLALAHMIKFRGHFLIEGDLNPDNSDVDKLFIQLVQTYNQLFEENPINASGVDAKAILSARLSKSRRLENLIAQLPGEKKNGLFGNLIALSLGLTPNFKSNFDLAEDAKLQLSKDTYDDDLDNLLAQIGDQYADLFLAAKNLSDAILLSDILRVNTEITKAPLSASMIKRYDEHHQDLTLLKALVRQQLPEKYKEIFFDQSKNGYAGYIDGGASQEEFYKFIKPILEKMDGTEELLVKLNREDLLRKQRTFDNGSIPHQIHLGELHAILRRQEDFYPFLKDNREKIEKILTFRIPYYVGPLARGNSRFAWMTRKSEETITPWNFEEVVDKGASAQSFIERMTNFDKNLPNEKVLPKHSLLYEYFTVYNELTKVKYVTEGMRKPAFLSGEQKKAIVDLLFKTNRKVTVKQLKEDYFKKIECFDSVEISGVEDRFNASLGTYHDLLKIIKDKDFLDNEENEDILEDIVLTLTLFEDREMIEERLKTYAHLFDDKVMKQLKRRRYTGWGRLSRKLINGIRDKQSGKTILDFLKSDGFANRNFMQLIHDDSLTFKEDIQKAQVSGQGDSLHEHIANLAGSPAIKKGILQTVKVVDELVKVMGRHKPENIVIEMARENQTTQKGQKNSRERMKRIEEGIKELGSQILKEHPVENTQLQNEKLYLYYLQNGRDMYVDQELDINRLSDYDVDAIVPQSFLKDDSIDNKVLTRSDKNRGKSDNVPSEEVVKKMKNYWRQLLNAKLITQRKFDNLTKAERGGLSELDKAGFIKRQLVETRQITKHVAQILDSRMNTKYDENDKLIREVKVITLKSKLVSDFRKDFQFYKVREINNYHHAHDAYLNAVVGTALIKKYPKLESEFVYGDYKVYDVRKMIAKSEQEIGKATAKYFFYSNIMNFFKTEITLANGEIRKRPLIETNGETGEIVWDKGRDFATVRKVLSMPQVNIVKKTEVQTGGFSKESILPKRNSDKLIARKKDWDPKKYGGFDSPTVAYSVLVVAKVEKGKSKKLKSVKELLGITIMERSSFEKNPIDFLEAKGYKEVKKDLIIKLPKYSLFELENGRKRMLASAGELQKGNELALPSKYVNFLYLASHYEKLKGSPEDNEQKQLFVEQHKHYLDEIIEQISEFSKRVILADANLDKVLSAYNKHRDKPIREQAENIIHLFTLTNLGAPAAFKYFDTTIDRKRYTSTKEVLDATLIHQSITGLYETRIDLSQLGGDSGGSSGGSSGSETPGTSESATPESSGGSSGGSSDKWKHKFELKENRWVYVPSEEMLKFGKKIHQYIRHKWKYPLYMYHLRDGGHVAAAKLHIKNDYFSLIDISDFFGSTSQSRVTRELKKLIPYAKAREIAKLSTVRIPNANGLKHAIPYGYPQSPILATLCFHNSYCGGVINTINKSGHVTVSVYMDDIILSSDDLAQLNQAFDTVCEALRKSRYEVNENKTQSPSTMINVFNLELSHNSLRVSPERMVQFIQAYVKSDNEHERKGIASYVHSVNPDQARLHFSGGSKRTADGSEFEPKKKRKV

SEQ ID NO: 1164 - protein, 1687 aa, synthetic construct
MKRTADGSEFESPKKKRKVDKKYSIGLDIGTNSVGWAVITDEYKVPSKKFKVLGNTDRHSIKKNLIGALLFDSGETAEATRLKRTARRRYTRRKNRICYLQEIFSNEMAKVDDSFFHRLEESFLVEEDKKHERHPIFGNIVDEVAYHEKYPTIYHLRKKLVDSTDKADLRLIYLALAHMIKFRGHFLIEGDLNPDNSDVDKLFIQLVQTYNQLFEENPINASGVDAKAILSARLSKSRRLENLIAQLPGEKKNGLFGNLIALSLGLTPNFKSNFDLAEDAKLQLSKDTYDDDLDNLLAQIGDQYADLFLAAKNLSDAILLSDILRVNTEITKAPLSASMIKRYDEHHQDLTLLKALVRQQLPEKYKEIFFDQSKNGYAGYIDGGASQEEFYKFIKPILEKMDGTEELLVKLNREDLLRKQRTFDNGSIPHQIHLGELHAILRRQEDFYPFLKDNREKIEKILTFRIPYYVGPLARGNSRFAWMTRKSEETITPWNFEEVVDKGASAQSFIERMTNFDKNLPNEKVLPKHSLLYEYFTVYNELTKVKYVTEGMRKPAFLSGEQKKAIVDLLFKTNRKVTVKQLKEDYFKKIECFDSVEISGVEDRFNASLGTYHDLLKIIKDKDFLDNEENEDILEDIVLTLTLFEDREMIEERLKTYAHLFDDKVMKQLKRRRYTGWGRLSRKLINGIRDKQSGKTILDFLKSDGFANRNFMQLIHDDSLTFKEDIQKAQVSGQGDSLHEHIANLAGSPAIKKGILQTVKVVDELVKVMGRHKPENIVIEMARENQTTQKGQKNSRERMKRIEEGIKELGSQILKEHPVENTQLQNEKLYLYYLQNGRDMYVDQELDINRLSDYDVDAIVPQSFLKDDSIDNKVLTRSDKNRGKSDNVPSEEVVKKMKNYWRQLLNAKLITQRKFDNLTKAERGGLSELDKAGFIKRQLVETRQITKHVAQILDSRMNTKYDENDKLIREVKVITLKSKLVSDFRKDFQFYKVREINNYHHAHDAYLNAVVGTALIKKYPKLESEFVYGDYKVYDVRKMIAKSEQEIGKATAKYFFYSNIMNFFKTEITLANGEIRKRPLIETNGETGEIVWDKGRDFATVRKVLSMPQVNIVKKTEVQTGGFSKESILPKRNSDKLIARKKDWDPKKYGGFDSPTVAYSVLVVAKVEKGKSKKLKSVKELLGITIMERSSFEKNPIDFLEAKGYKEVKKDLIIKLPKYSLFELENGRKRMLASAGELQKGNELALPSKYVNFLYLASHYEKLKGSPEDNEQKQLFVEQHKHYLDEIIEQISEFSKRVILADANLDKVLSAYNKHRDKPIREQAENIIHLFTLTNLGAPAAFKYFDTTIDRKRYTSTKEVLDATLIHQSITGLYETRIDLSQLGGDSGGSSGGSSGSETPGTSESATPESSGGSSGGSSRWEHKFEIKPDRWVYVPSEECREEGAKILNYIRKKWTPPLYFYHLRNGGHVEAARLHLENDYFAHIDIKQFFQSTSRSRVTRTLKEFFPYEKAREIAKFSTVRNPTNNRHKHVLPFGFVQSPILATLCLHKSYLGNLIRELNKRGDIKISVYMDDIIISSNDLEMLETTYDELCEAMEKSGYQINENKTQPPSNKITVFNIELSHNSMRVTPQRMVEFLIDYTKSDNPHEKEGIKSYVKSVNPEQAKSGGSKRTADGSEFEPKKKRKV

SEQ ID NO: 1165 - protein, 1691 aa, synthetic construct
MKRTADGSEFESPKKKRKVDKKYSIGLDIGTNSVGWAVITDEYKVPSKKFKVLGNTDRHSIKKNLIGALLFDSGETAEATRLKRTARRRYTRRKNRICYLQEIFSNEMAKVDDSFFHRLEESFLVEEDKKHERHPIFGNIVDEVAYHEKYPTIYHLRKKLVDSTDKADLRLIYLALAHMIKFRGHFLIEGDLNPDNSDVDKLFIQLVQTYNQLFEENPINASGVDAKAILSARLSKSRRLENLIAQLPGEKKNGLFGNLIALSLGLTPNFKSNFDLAEDAKLQLSKDTYDDDLDNLLAQIGDQYADLFLAAKNLSDAILLSDILRVNTEITKAPLSASMIKRYDEHHQDLTLLKALVRQQLPEKYKEIFFDQSKNGYAGYIDGGASQEEFYKFIKPILEKMDGTEELLVKLNREDLLRKQRTFDNGSIPHQIHLGELHAILRRQEDFYPFLKDNREKIEKILTFRIPYYVGPLARGNSRFAWMTRKSEETITPWNFEEVVDKGASAQSFIERMTNFDKNLPNEKVLPKHSLLYEYFTVYNELTKVKYVTEGMRKPAFLSGEQKKAIVDLLFKTNRKVTVKQLKEDYFKKIECFDSVEISGVEDRFNASLGTYHDLLKIIKDKDFLDNEENEDILEDIVLTLTLFEDREMIEERLKTYAHLFDDKVMKQLKRRRYTGWGRLSRKLINGIRDKQSGKTILDFLKSDGFANRNFMQLIHDDSLTFKEDIQKAQVSGQGDSLHEHIANLAGSPAIKKGILQTVKVVDELVKVMGRHKPENIVIEMARENQTTQKGQKNSRERMKRIEEGIKELGSQILKEHPVENTQLQNEKLYLYYLQNGRDMYVDQELDINRLSDYDVDAIVPQSFLKDDSIDNKVLTRSDKNRGKSDNVPSEEVVKKMKNYWRQLLNAKLITQRKFDNLTKAERGGLSELDKAGFIKRQLVETRQITKHVAQILDSRMNTKYDENDKLIREVKVITLKSKLVSDFRKDFQFYKVREINNYHHAHDAYLNAVVGTALIKKYPKLESEFVYGDYKVYDVRKMIAKSEQEIGKATAKYFFYSNIMNFFKTEITLANGEIRKRPLIETNGETGEIVWDKGRDFATVRKVLSMPQVNIVKKTEVQTGGFSKESILPKRNSDKLIARKKDWDPKKYGGFDSPTVAYSVLVVAKVEKGKSKKLKSVKELLGITIMERSSFEKNPIDFLEAKGYKEVKKDLIIKLPKYSLFELENGRKRMLASAGELQKGNELALPSKYVNFLYLASHYEKLKGSPEDNEQKQLFVEQHKHYLDEIIEQISEFSKRVILADANLDKVLSAYNKHRDKPIREQAENIIHLFTLTNLGAPAAFKYFDTTIDRKRYTSTKEVLDATLIHQSITGLYETRIDLSQLGGDSGGSSGGSSGSETPGTSESATPESSGGSSGGSSQRWEHKFEIKPGRWVYVPSEEMLKFGKKIHNYVRKKWNPPLYFYHLRDGGHVKAARLHLKNDYFAVIDIKQFFQSTSQSRVTRELKKYFPYEQAREIAKFSTVRNPNSNGHKYVIPYGYPQSPILATLCLHKSYCGGLLRRINKSGDMKLSVYMDDIIISSNDLATLQTAYDEICEAMEKSGYQMNMTKTQAPSNKIKVFNLELSHGSMRVTPQRMVEFLIDYYKSDNEHHRKGIANYVGSVNPEQAKLFRSGGSKRTADGSEFEPKKKRKV

SEQ ID NO: 1166 - protein, 1696 aa, synthetic construct
MKRTADGSEFESPKKKRKVDKKYSIGLDIGTNSVGWAVITDEYKVPSKKFKVLGNTDRHSIKKNLIGALLFDSGETAEATRLKRTARRRYTRRKNRICYLQEIFSNEMAKVDDSFFHRLEESFLVEEDKKHERHPIFGNIVDEVAYHEKYPTIYHLRKKLVDSTDKADLRLIYLALAHMIKFRGHFLIEGDLNPDNSDVDKLFIQLVQTYNQLFEENPINASGVDAKAILSARLSKSRRLENLIAQLPGEKKNGLFGNLIALSLGLTPNFKSNFDLAEDAKLQLSKDTYDDDLDNLLAQIGDQYADLFLAAKNLSDAILLSDILRVNTEITKAPLSASMIKRYDEHHQDLTLLKALVRQQLPEKYKEIFFDQSKNGYAGYIDGGASQEEFYKFIKPILEKMDGTEELLVKLNREDLLRKQRTFDNGSIPHQIHLGELHAILRRQEDFYPFLKDNREKIEKILTFRIPYYVGPLARGNSRFAWMTRKSEETITPWNFEEVVDKGASAQSFIERMTNFDKNLPNEKVLPKHSLLYEYFTVYNELTKVKYVTEGMRKPAFLSGEQKKAIVDLLFKTNRKVTVKQLKEDYFKKIECFDSVEISGVEDRFNASLGTYHDLLKIIKDKDFLDNEENEDILEDIVLTLTLFEDREMIEERLKTYAHLFDDKVMKQLKRRRYTGWGRLSRKLINGIRDKQSGKTILDFLKSDGFANRNFMQLIHDDSLTFKEDIQKAQVSGQGDSLHEHIANLAGSPAIKKGILQTVKVVDELVKVMGRHKPENIVIEMARENQTTQKGQKNSRERMKRIEEGIKELGSQILKEHPVENTQLQNEKLYLYYLQNGRDMYVDQELDINRLSDYDVDAIVPQSFLKDDSIDNKVLTRSDKNRGKSDNVPSEEVVKKMKNYWRQLLNAKLITQRKFDNLTKAERGGLSELDKAGFIKRQLVETRQITKHVAQILDSRMNTKYDENDKLIREVKVITLKSKLVSDFRKDFQFYKVREINNYHHAHDAYLNAVVGTALIKKYPKLESEFVYGDYKVYDVRKMIAKSEQEIGKATAKYFFYSNIMNFFKTEITLANGEIRKRPLIETNGETGEIVWDKGRDFATVRKVLSMPQVNIVKKTEVQTGGFSKESILPKRNSDKLIARKKDWDPKKYGGFDSPTVAYSVLVVAKVEKGKSKKLKSVKELLGITIMERSSFEKNPIDFLEAKGYKEVKKDLIIKLPKYSLFELENGRKRMLASAGELQKGNELALPSKYVNFLYLASHYEKLKGSPEDNEQKQLFVEQHKHYLDEIIEQISEFSKRVILADANLDKVLSAYNKHRDKPIREQAENIIHLFTLTNLGAPAAFKYFDTTIDRKRYTSTKEVLDATLIHQSITGLYETRIDLSQLGGDSGGSSGGSSGSETPGTSESATPESSGGSSGGSSTIEVQRWEHKFEIKPGVWVYVPSVEARKCGEKILQAVRNKWIPPLYFYHLRTGGHLKAARLHLKSDFFAVVDIKQFFQSTSRSRITRDLKSYFTYSQAREISKFSTVRNLSHTPHKHVLPFGFVQSPILATLCLDKSHLGSLLRRLNKHPDMKLSVYMDDVIISSNDLVQLQTAYDEILVAMEKSGYQANMIKTQAPSSLIKVFNLTLSKGVMKVTSQKMSDFLIDFYASDYEPHKIGVKNYVESVNPEQAKLLKLSGGSKRTADGSEFEPKKKRKV

SEQ ID NO: 1167 - protein, 1695 aa, synthetic construct
MKRTADGSEFESPKKKRKVDKKYSIGLDIGTNSVGWAVITDEYKVPSKKFKVLGNTDRHSIKKNLIGALLFDSGETAEATRLKRTARRRYTRRKNRICYLQEIFSNEMAKVDDSFFHRLEESFLVEEDKKHERHPIFGNIVDEVAYHEKYPTIYHLRKKLVDSTDKADLRLIYLALAHMIKFRGHFLIEGDLNPDNSDVDKLFIQLVQTYNQLFEENPINASGVDAKAILSARLSKSRRLENLIAQLPGEKKNGLFGNLIALSLGLTPNFKSNFDLAEDAKLQLSKDTYDDDLDNLLAQIGDQYADLFLAAKNLSDAILLSDILRVNTEITKAPLSASMIKRYDEHHQDLTLLKALVRQQLPEKYKEIFFDQSKNGYAGYIDGGASQEEFYKFIKPILEKMDGTEELLVKLNREDLLRKQRTFDNGSIPHQIHLGELHAILRRQEDFYPFLKDNREKIEKILTFRIPYYVGPLARGNSRFAWMTRKSEETITPWNFEEVVDKGASAQSFIERMTNFDKNLPNEKVLPKHSLLYEYFTVYNELTKVKYVTEGMRKPAFLSGEQKKAIVDLLFKTNRKVTVKQLKEDYFKKIECFDSVEISGVEDRFNASLGTYHDLLKIIKDKDFLDNEENEDILEDIVLTLTLFEDREMIEERLKTYAHLFDDKVMKQLKRRRYTGWGRLSRKLINGIRDKQSGKTILDFLKSDGFANRNFMQLIHDDSLTFKEDIQKAQVSGQGDSLHEHIANLAGSPAIKKGILQTVKVVDELVKVMGRHKPENIVIEMARENQTTQKGQKNSRERMKRIEEGIKELGSQILKEHPVENTQLQNEKLYLYYLQNGRDMYVDQELDINRLSDYDVDAIVPQSFLKDDSIDNKVLTRSDKNRGKSDNVPSEEVVKKMKNYWRQLLNAKLITQRKFDNLTKAERGGLSELDKAGFIKRQLVETRQITKHVAQILDSRMNTKYDENDKLIREVKVITLKSKLVSDFRKDFQFYKVREINNYHHAHDAYLNAVVGTALIKKYPKLESEFVYGDYKVYDVRKMIAKSEQEIGKATAKYFFYSNIMNFFKTEITLANGEIRKRPLIETNGETGEIVWDKGRDFATVRKVLSMPQVNIVKKTEVQTGGFSKESILPKRNSDKLIARKKDWDPKKYGGFDSPTVAYSVLVVAKVEKGKSKKLKSVKELLGITIMERSSFEKNPIDFLEAKGYKEVKKDLIIKLPKYSLFELENGRKRMLASAGELQKGNELALPSKYVNFLYLASHYEKLKGSPEDNEQKQLFVEQHKHYLDEIIEQISEFSKRVILADANLDKVLSAYNKHRDKPIREQAENIIHLFTLTNLGAPAAFKYFDTTIDRKRYTSTKEVLDATLIHQSITGLYETRIDLSQLGGDSGGSSGGSSGSETPGTSESATPESSGGSSGGSSTIEVQRWEHKFEIKPGVWVYVPSPEAVKCGGKILQAVRNHWNPPLYFYHLRTGGHLKATRLHLKNDYFAVVDIKQFFQSTSRSRITRCLNEYFTYEQAREISRYSTVRNPSSGPHKHVLPFGFVQSPILATLCLDKSYLGSLLRRLNRHGDMKLSVYMDDVIISSNDFQQLQTTYDEILQAMEKSGYQANMKKTQPPSNKIVVFNITLRHGNMKVTAQRMSDFLIDFYASNYEPHKIGVKNYVESVNPEQAKLFRSGGSKRTADGSEFEPKKKRKV

SEQ ID NO: 1168 - protein, 255 aa, Pantoea sp.
MNTENEWLHKFEIKPGRWVYIPNEATLKQGKLIHAYIRSKWKSPPYMFHLREGGHVAAANHHVQKKYFALIDIQDFFGATSQSRITRALGNLIPYDKARKIAKLSTVKNQNGNGLKHVIPYGYPQSPILASFCFHQSFCGNIIKNISKSGDIYVSIYMDDILLSGNDLGRLEDTFKAVNEALVKSGYTVNRSKTQLPSTIVNVFNLELSQNSLRISAKRIVDFLQAYISSSHPPEKKGIASYVGSVNKEQARLFK

SEQ ID NO: 1169 - protein, 256 aa, Providencia alcalifaciens
MTAYQNRWLHKFEFKKDRWIYVPSLEERNKGLAFLDDLYLKWTPPLYYYHLRNGGHIAALKAHLENKYFTHIDIKGFFNSTGRSRITRVLKEFYQFEKAREIAKFSTVKNLVNSTPSHVLPFGFVQSPILATLCLHKSFLGNKIRECFNRKDIKISVYMDDIIISSSEKELLDEIYMELLKAVVRSNYYINEEKKNPPSDHVVVFNIHLSHLHLKITEKRIVDLLIDYTKAKSNHVKEGIKSYVKTVNSEQYKIFK

SEQ ID NO: 1170 - protein, 255 aa, Citrobacter freundii
MKPTSHWLHKFEVKENRWVYIPDAKTHQLGQKIHIYIKNKWKSPLYMYHLREGGHVAAANHHIRNKYFSLIDISNFFGATSQSRVTRELGRLIPYVKAREIAKLSTVHNLNGNGLKHVIPYGYPQSPILASLCFHQSFCGSTINTISKSGHVSVSIFMDDILLSSDDLDQLKNAFDMILEALRKSGYTVNEDKTQSPASMVNVFNLELSQNSLRVTSKRIVEFLQAFISSKNPYERKGIASYVGSINKAQAKLFR

SEQ ID NO: 1171 - protein, 248 aa, Aliivibrio fischeri
WSNRFEIKKDRWVYNPTIESRAFGKQILKHLNKSWKKPDYYYHLRDGGHVEALKIHLESQFFATIDISDFFGYLSRSRITRTLKSILSYDVARKIAKISTVKAMDSYPHSHHLPYGFVQSPLLASICLFDSTLGNLLDTINKNNSAKVSVYMDDIVISSNDENLLISLFNDIHVAAKKSNFLLNPTKTKSVAQQTEAFNIILSHRMMKVEYNRFLDFQQAYALSDSEYVRNGIGSYVGSINKQQAKLL

SEQ ID NO: 1172 - protein, 254 aa, unidentified
  source 1..254: note = A0A645CSZ8
METWKHKYLLKENKWVHIPSEEMIKYGSSLHKYIKRNWKFPLYYYHLRNGGHVAAAKLHKSNDFFCLIDIKGFFESTSQSRVTRELKKIIPYDKARHIAKLSTVRLPNAVKHKFAVPYGYPQSPVLATLCLQNSYAGTVIDSFYKSGIVTVSVYMDDIILSSKDLATLNQHFEILCEALRKSRYELNFSKTQNPATKISVFNLELGHRHLKVESERMVLFIQAFAKTRNKHEKKSIAKYVHTVNPDQAERHFPK

SEQ ID NO: 1173 - protein, 249 aa, Pantoea ananatis
WLHKFEIKENRWVFIPNEDTLTLGRKIHKYIKSKWKFPLYMFHLRDGGHVAAANYHIENTYFCLIDISDFFGATSQSRITRELNKFIPYDRAREIAKLSTVKNLNSNGLKKVLPYGYPQSPILASFCFRQSYCGKVIHTLSKSGNISISVYMDDILLSSDDIEQLVYAFNSIKTALKKSGYTVNEAKTQSPSTSVNVFNLVLSKNLLKVSSIRIVEFLQAYISSQNPAEKKGIASYVGSVNKTQAKLFQ

SEQ ID NO: 1174 - protein, 250 aa, Gallionellales bacterium GWA2_59_43
ERWRSKFKIKECTWVFVPTDETIATGLQVKELIEGYWSAPDHYYHLRKGGHVLALQKHTKHKFFIHLDIQNFFGQINKSRVTRCLKEHIPYESAREIAVESTVRLPESAETKFILPFGFVQSPIIASLCLSKSALGRYLYRLEQRKGLDVSVYMDDILISGDNIEELEQELVKIKAAAEKSGLPLNPLKQEGPDTCVSAFNIRLSQGLLKIIPSKLQELANTYSSSTNEHQRAGILNYVLSINLAQAELF

SEQ ID NO: 1175 - protein, 206 aa, unidentified
  source 1..206: note = UPI00067B7A84
GKWFFVPNDKCERRGRRMLAYFKRRLVFPDYMYHFKKGGHVGALHAHLNNQLFFKIDIQNFYYSIARMRVTRALRQWGYPGANTFAMWSCVRNPLPGPKHALPIGFVQSPLLASLALIKSEVAEAIDRATAKGVCISVYLDDFIGSHDDEAVLKEAYEDIRATCVAAGFIPNPSKLAPPQAAITAFNCDLTSGAAEVTTDRVAKYL

SEQ ID NO: 1176 - protein, 250 aa, Pseudomonas fluorescens
HKWLSRFRIKSNTWVYVPTLEAVKEGKLLKKIIEFKWSPPANYYHLKSGGHVDALKYHLNGKFFVHADIKKFFNSINRSRITRELKPYFGYEKSRAIAMESTVSIPLDSGQVFALPFGFVQSTIIASLCFRKSSLGNTIDILNNTKGVRVSIYVDDIIISTHCLEKAEAALLMIQKSAARSGFTLNEEKTQGPSTTITAFNIDLQQNLMKITDWRFNELLSSYKDASSDKQKSGIWGYVNSISPAQASML

SEQ ID NO: 1177 - protein, 246 aa, Vibrio anguillarum
WTSKYEMKPGRWVYVQSSEAKKLGRNINEHIRKHWKIPSYFYHLQLGGHVQALKVHIDNKHFSSLDITDFFGSVSRTRVTRELKSLIGYERARAIAKASTIPHCNPDEHSHSLPYGFSQSPLLASICLAQSHFGSCIRACHETDGMSLSVYMDDIVISSNDEQMLLLWHEKLKIAAGKSKFKLNSLKENISSTSIEVFNINITEHEMHVSDKRFSKLHTVYSLSESEHQRKGIGGYVWTVNPDQAK

SEQ ID NO: 1178 - protein, 254 aa, Vibrio parahaemolyticus
IYTASWSNRFEIKQGRWVYNPTTECRTQGSDILKELNKSWKKPEYYYHLREGGHVAALNVHKGSKYFATLDLCDFYGSISRSRVTRALKPIIGYERARKVAKISTVKAPSNYPYSHYLPYGFVQSPILASICLFDSYLGKLIDSLHDETASINISVYMDDIVISSNDEEALVSTFSELELAAYKSKFALSEKKTKQVATSTSAFNIIISIDEMIIEEERFQQLKLVYSMSESKHQRHGIGSYVGTVNKQQARLL

SEQ ID NO: 1179 - protein, 251 aa, synthetic construct
DEWLHKFEIKENRWVYVPSEETLELGQKIHAYIKHKWKYPLYMFHLREGGHVAAANYHIKKQYFSLIDISDFFGATSQSRVTRELGRLIPYVKAREIAKLSTVKNPNGNGLKHVIPYGYPQSPILASLCFHQSFCGGVINTISKSGQISVSIYMDDILLSSDDMSQLENAFDTVKEALRKSGYCVNENKTQSPSTMVNVFNLELSQNSLRVTPKRIVEFLQAYISSKNPHERKGIASYVGSVNKSQAKLFR

SEQ ID NO: 1180 - protein, 246 aa, synthetic construct
RWDSKFELKPGKWVFVPTPETIEQGKQIKDQIQERWKAPAYYYHLRQGGHVAALKQHLGHTYFIHVDIKNFFGSINRSRVTRALKGYFGYDKAREIAMESTVRLPEDAEQRYILPFGFVQSPIIASVCLRKSALGRCLHQLSQQDGVEVSVYVDDIIISANDPERLEQAFEDIKKAAEKSGFPLNEEKQQGPSERITAFNIELSQNSLQITPERWGEFLDAYHQSTNDHQKQGILGYVNSVNPAQA

SEQ ID NO: 1181 - protein, 249 aa, synthetic construct
WLHKFEIKENRWVYIPNEETLQLGQKIHAYIKQKWKYPLYMFHLREGGHVAAANYHIKNKYFCLIDISDFFGATSQSRVTRELGRLIPYVKAREIAKLSTVKNLNGNGLKHVIPYGYPQSPILASLCFHQSFCGGVINTISKSGHVSVSIYMDDILLSSDDMGQLENAFDTVREALRKSGYTVNENKTQSPSTMVNVFNLELSQNSLRVTPKRIVEFLQAFISSSNPHERKGIASYVGSINKSQAKLFR

SEQ ID NO: 1182 - protein, 246 aa, synthetic construct
KWIHKFELKPGKWVYVPSRQAAAIGRQIHKTLRKHWTPPEYYFHLRSGGHVEALRFHVDNHFFCHLDIKNFFGSITRSRITRSLKPFLSYPTARDMANQSTVQHPDCKGMRYMLPYGFVQSPLLASICLHQSHLGECLKDLNQNPHLRISIYMDDLVISGNDRDLINEAFADVKKAAKKSHFEFNEMKEQGPQDLITAFNIEISHQCIEITDERMHEFHENYRATDNNHVKRGITNYIRSVNPAQA

SEQ ID NO: 1183 - protein, 251 aa, synthetic construct
VKWEHKFEIKKDRWVYVPTDEMRLYGEELHNYLRKRWVPPLYFYHLRDGGHVACAKKHLHNEYFALIDIKNFFESTGQSRVTREIKNYFTYNDAREIAKLSTVRNPLPVGPKYIIPYGFPQSPILSTFCLHKSYCGGLFKQIDSNPGIDISIYMDDIIISGNDLELCNLNYKLLCDGLIRSGYEMNENKSQAPSESIHAFNLELKHDSLRVLPFRVIEFLVAYTKSDNPHVRKGIASYVGSINTEQAKLFR

SEQ ID NO: 1184 - protein, 254 aa, synthetic construct
NTENEWLHKFEIKPGRWVYIPNEATLKQGKLIHAYIRSKWKSPPYMFHLREGGHVAAANHHVQKKYFALIDIQDFFGATSQSRITRALGNFIPYDKARKIAKLSTVKNQNGNGLKHVIPYGYPQSPILASFCFHQSFCGNIIKNISKSGDIYVSIYMDDILLSGNDLGRLEDTFKAVNEALVKSGYTVNRSKTQLPSTIVNVFNLELSQNSLRISAKRIVDFLQTYISSSHPPEKKGIASYVGSVNKEQARLFK

SEQ ID NO: 1185 - protein, 249 aa, synthetic construct
WLHKFEIKENRWVYIPNEETLTLGRKIHAYIKSKWKHPLYMFHLREGGHVAAANYHIQKKYFCLIDISDFFGATSQSRITRELGKFIPYDKAREIAKLSTVKNLNGNGLKHVIPYGYPQSPILASFCFHQSFCGNVINTISKSGNISVSIYMDDILLSSNDMGQLAYAFNSVKQALKKSGYTVNESKTQLPSTSVNVFNLELSQNSLRISPKRIVEFLQAYISSSHPPEKKGIASYVGSVNKTQAKLFQ

SEQ ID NO: 1186 - protein, 249 aa, synthetic construct
WLHKFEVKENRWVYIPNAETLQLGQKIHTYIKNKWKSPLYMFHLREGGHVAAANYHIQKKYFCLIDISDFFGATSQSRITRELGRLIPYDKAREIAKLSTVKNLNGNGLKHVIPYGYPQSPILASFCFHQSFCGSVINTISKSGNVSVSIYMDDILLSSDDLGQLENAFDMILEALRKSGYTVNENKTQSPSTMVNVFNLELSQNSLRVSSKRIVEFLQAYISSKNPPERKGIASYVGSVNKAQAKLFR

SEQ ID NO: 1187 - protein, 251 aa, synthetic construct
DKWEHKFEIKEDQWVYVPTKEMREYGKRLHNHLREKWTPPLYFYHMRDGGHVACAKKHLNNEYFALIDIKNFFESTGQSRVTRELKHYFPYNDARQIAKLSTVRNPMPHGPKYIIPYGYPQSPILSTLCLHKSYCGGLFKQINKSGNIDISIYMDDIIISGNDLNVCAATYTLLCEGLKRSGYQMNSTKSQSPSKKIRVFNLELKHQSLRVLSQRIIEFLIAYTKSTNPHEMKGIASYVGSVNAEQAKLFR

SEQ ID NO: 1188 - protein, 254 aa, synthetic construct
STPSDWLHKFEIKTERWVFVPSKETLERGRQIHAYIKQKWKYPRYMFHLRNGGHVAAANFHLKSNYFSLIDVSDFYGATSQSRVTRELGRLVPYVKARQIARLSTVANPNRNGFKHVIPYGYPQSPILASLCFHHSFCGGVISSISKSERVFVSVYMDDILLSSDDMNLLVEAFDTVRQALRKSGYKVNENKTQSPSPKIQVFNLELGHNHLRVTPKRIVEFLKVFISSANEHERKGIASYVGSINKSQAKLFR

SEQ ID NO: 1189 - protein, 247 aa, synthetic construct
WEHKFELKENKWVHIPTEEMIKFGKKLHQYIRKKWKAPLYYYHLRNGGHVAAAKLHTGNDYFCLIDIKNFFECTSQSRVTRELKKIIPYEQARQIAKLSTVRIPNAQPHKFAVPYGYPQSPILATLCLHNSYAGGVIDSIHKSGCVTVSVYMDDIILSSKDLATLNQEFDILCNALVKSRYEVNTSKTQHPAPEISVFNLELSHNHLKVAPERMVQFIQAYAKSDNEHEREGIARYVHSVNPDQARR

SEQ ID NO: 1190 - protein, 246 aa, synthetic construct
RWIHKFELKKDRWVYVPSEACRNEGVEILNYLNRKWTPPVYYYHLRKGGHIEALKVHLENDWFTHIDIKGFFNSTSRSRVTRTLKEFYPYEKARNIAKMSTVKNFTNDKFSHILPFGFVQSPMLATLCLHKSYLGNLIRELFNCKDIKISVYMDDIIISSSDKELLDEIYCELMECVVKSHYYIPEKKQPPSDRITVFNIDLSHQSMRITQKRMLDFLIEYTKTKSDHVKEGIRSYVKTVNLEQYE

SEQ ID NO: 1191 - protein, 245 aa, synthetic construct
KWTHRFERKPGRWVFVPTDEARAQGREIKGLIEGLWKAPDYYFHLRSGGHVAALREHQASQCFLKVDIEDFFGSVSRNRITRVLKGYVSHAEARRWATESTVRHPADPGRTILPYGFVQSPLLASLVLHDTGLGRYLDQLSKEPGLVVTVYVDDIIVSCHDMEELEDVLTEMKTAAQRSRFALSDEKQQGPAPTITAFNIELAGTPLEVSPARMAEFREALQTTTSERQRAGIQNYVRQVNAVQA

SEQ ID NO: 1192 - protein, 239 aa, synthetic construct
RFTLPPGTQVYIPTEHGRERGTEIKKQVEGRWKPPANYFHLLEGGHVAAVRTHHNQPWIASLDLQRFFDQITRTRVHRALKRIGMPQQDAWEMACDSTVDKDPPNRHFSLPFGFVQSPILASVVLAQSALGGAIRNLRKGGLTVTVYVDDITISGDDEEQVFAAVDQLETGAELAGFAFNEEKTQGPAGEVTSFNIAFGSGRMEVTEDRMAEFEAAIRNGSEWQIEGILGYVGSVNAGQ

SEQ ID NO: 1193 - protein, 249 aa, synthetic construct
WLHRFEVKPDRWVYIPNEETLAQGGGIHAYIRQKWKHPLYMFHLREGGHVAAANHHLQKKYFCLIDIQDFFGATSQSRITRELGRLIPYDKAREIAKLSTIKNQNGNGLKHVIPYGYPQSPILASFCFHHSFCGGVINNINKSGDVSVTIYMDDILLSGNDMGRLEDTFDNVNQALDRSCYTVNENKTQLPSHTVNVFNLELSHNSLRISPKRMVDFLQAYISSSHPPERKGIASYVGSVNKEQARLFR

SEQ ID NO: 1194 - protein, 256 aa, synthetic construct; identical to SEQ ID NO: 991

SEQ ID NO: 1195 - protein, 256 aa, synthetic construct
TIEVQRWEDKFEIKPGVWVYVPSVEARKVGGKILQAVRNKWIPPLYFYHLRTGGHLKAARLHLKSDFFAVVDIKQFFQSTSRSRITRDLKSYFTYSQAREISTFSTVRNLSHSIHKHVLPFGFVQSPILATLCLDKSYFGSLLRRLNKNHDLKLSVFMDDVIISSNNLAQLQAAYDEALVAMRKSGYQANMSKTQAPSSKISVFNLTLSKGVMKVTSQKMSDFLIDFYSSNYEPHRIGVKNYVEAVNPGQAKLFKL

SEQ ID NO: 1196 - protein, 256 aa, synthetic construct
TIEVQRWEDKFEIKPGVWVYVPSVEARKVGGKILQAVRNKWIPPLYFYHLRTGGHLKAARLHLKSDFFAVVDIKQFFQSTNRSRITRDLCSYFTYSQAREISTFSTVRCLSHSPHKHVLPFGFVQSPILATLCLDKSYFGSLLRRLNKHHDLKLSVFMDDVIISSNNLAQLQAAYDEALVAMRKSGYQANMSKTQAPSSKISVFNLTLSKGVMKVTSQKMSDFLIDFYSSNYEPHRIGVKNYVEAVNPGQAKLFKL

SEQ ID NO: 1197 - protein, 256 aa, synthetic construct
TIEVQRWEDKFEIKPGVWVYVPSVEARKVGGKILQAVRNKWIPPLYFYHLRTGGHLKAARLHLKSDFFAVVDIIQFFQSTSRSRITRDLKSYFTASQAREISTFSTVRNLSHSPHKHVLPFGFVQSPILATLCLDKSYFGSLLRRLNKHHDLKLSVFMDDVIISSNRLAYLQAAYDEALVAMRKSGYQANMSKTQAPSSKISVFNLTLSKGVMKVTSQKMSDFLIDFYSSNYEPHRIGVKNYVEAVNPGQAKLFKL

SEQ ID NO: 1198 - protein, 256 aa, synthetic construct
TIEVQRWEDKFEIKPGVWVYVPSVEARKVGGKILQAVRNKWIPPLYFYHLRTGGHLKAARLHLKSDFFAVVDIKQFFQSTYRSRITRDLKSYFTYSCAVEISTFSTVRNLSHSPHCHVLPFGFVQSPILATLCLDKSYFGSLLRRLNKHHDLKLSVFMDDVIISSNNLAQLQAAYDEALVAMRKSGYQANMSKTQAPSSKISVFNLTLSKGVMKVTSQKMSDFLIDFYSSNYEPHRIGVKNYVEAVNPGQAKLFKL

SEQ ID NO: 1199 - protein, 256 aa, synthetic construct
TIEVQRWEDKFEIKPGVWVTVPSVEARKVGGKILQAVRNKWIPPLYFYHLRTGGHLKAARLHLKSDFFAVVDIKQFFQSTSRSRITRDLKSYFTYSQAREISTFSTVRNLSHSIHKHVLPFGFVQSPILATLCLDKSYFGSLLRRLNKNHDLKLSVFMDDVIISSNNLAQLQAAYDEALVAMRKSGYQANMSKTQAPSSKINVFNLTLSKGVMKVTSQKMSDFLIDFYSSNYEPHRIGVKNYVEAVNPGQAKLFKL

SEQ ID NO: 1200 - protein, 256 aa, synthetic construct
TIEVQRWEDKFEIKPGVWVYVPSVEARKVGGKILQAVRNKWIPPLYFYHLRTGGHLKAARLHLKSDFFAVVDIKQFFQSTSDSRITRDLKSYFTYSQAREISTFSTVRNLSHSPHKHVLPFGFVQSPILATLCLDKSYFGSLLRRLNKHHDLKLSVFMDDVIISSNNLAQLQAAYDEALVAMRKSGYQANMSKTQAPSSKISVFNLTLSKGVMKVTSQKMSDFLIDFYSSNYEPHRIGVKNYVEAVNPGQAKLFKL

SEQ ID NO: 1201 - protein, 256 aa, synthetic construct
TIEVQRWEDKFEIKPGVWVYVPSVEARKVGGKILQAVRNKWIPPLYFYHLRTGGHLKAARLHLKSDYFAVVDIKQFFQSTSRSRITRDLKSYFTYSQAREISTFSTVRNLSHSPHKHVLPFGFVQSPILATLCLDKSYFGSLLRRLNKHHDLKLSVFMDDVIISSNNLAQLQAAYDEALVAMRKSGYQANMSKTQAPSSKISVFNLTLSKGVMKVTSQKMSDFLIDFYSSNYEPHRIGVKNYVEAVNPGQAKLFKL

SEQ ID NO: 1202 - protein, 256 aa, synthetic construct
TIEVQRHVDKFEIKPGVWVYVPSVEARKVGGKILQAVRNKWIPPLYFYHLRTGGHLKAARLHLKSDFFAVVDIKQFFQSTSRSRITRDLKSYFTYSQAREISTFSTVRNLSHSPHKHVLPFGFVQSPILATLCLDKSYFGSLLFRLNCHHDLKLSVFMDDVIISSNNLAQLQAAYDEALVAMRKSGYQANMSKTQAPSSKISVFNLTLSKGVMKVTSQKMSDFLIDFISSNYEPHRIGVKNYVEAVNPGQAKLFKL

SEQ ID NO: 1203 - protein, 256 aa, synthetic construct
TIEVQRWEDKFEIKPGVWVYVPSVEARKVGGKILQVVRNKWIPPLYFYHLRTGGHLKAARLHLKSDFFAVVDIKQFFQSTSRDRITRDLKSYFTYSQAREISTFSTVHNLSHSPHKHVLPFGFVQSPILATLCLDKSYFGSLLRRLNKHHDLKLSVFMDDVIISSNNLNQLQAAYDEALVAMRKSGYQANMSKTQAPSSKISVFNLTLSKGVMKVTSQKMSDFLIDFYSSNYEPHRIGVKNYVEAVNPGQAKLFKL

SEQ ID NO: 1204 - protein, 256 aa, synthetic construct
TIEVQRWEDKFEIKPGVWVYVPSVEARKVGGKILQAVRNKWIPPLYFYHLRTGGHLQAARLHLKSDFFAVVDIKQFFQSTSRSRITRDLKSYFTYSQAREISTQSTVRNLSHSPHKHVLPFGFVQSPILATLCLDKSYFGSMLRRLNKHHDLKLSVFMDDVIISSNNLAQLQAAYDEALVAMRKSGYQANMSKTQAPSSKISVFNLTLSKGVMKVTSQKMSDFLIDFYSENYEPHRIGVKNYVEAVNPGQAKLFKL

SEQ ID NO: 1205 - protein, 256 aa, synthetic construct
TIEVQRWEDKFEIKPGVWVYVPSVEARKVGGKILQAVRNKWIPPLYFYHLRTGGHLKAARLHLKSDFFAVVDIKQFFQSTSRSRITRDLKSYFTYSQAREISTFSTVRNLSHSPHKHVLPFGFVQSPILATLCLDKSYFGSLLRRLNKHHDLKLSVFMDDVIISSNNLAQLQAAYDEALVAMRKSGYQANMSKTQAPSSKISVFNLYLSKGVMKVTSQKMSDFLIDFYSSNYEPHRIGVKNYVEAVNPGQAKLFKL

SEQ ID NO: 1206 - protein, 256 aa, synthetic construct
TIEVQRWEDKFEIKPGVWVYVPSVEARKVGGKILQAVRNKWIPPLYFYHLRTGGHLKAARLHLKSDFFAVVDIKQFFQSTSRSRITRDLKSYFTYSQAREISTFSTVRNLWHSPHKHVLPFGFVQSPILATLCLDKSYFGSLLRRLNKHHDLKLSVFMDDVIISSNNLAQLQAAYDEALVAMRKSGYQANMSKTQAPSSKISVFNLTLSKGVMKVTSQKMSDFLIDFYSSNYEPHRIGVKNYVEAVNPGQAKLFKL

SEQ ID NO: 1207 - protein, 256 aa, synthetic construct
TIEVQRWEDKFEIKPGVWVYVPSVEARKVGGKILQAVRNKWIPPLYFYHLRTGGHLKAARLHLKSDFFAVVDIKQFFQSTSRSRITRDLKSYFTYSQAREISTFSTVRNLSHSPNKHVLPFGFVQSPILATLCLDKSYFGSLLRRLNKHHDLKLSVFMDDVIISSNNLAQLQAAYDEALVAMRKSGYQANMSKTQAPSSKISVFNLTLSKGVMKVTSQKMSDFLIDFYSSNYEPHRIGVKNYVEAVNPGQAKLFKL

SEQ ID NO: 1208 - protein, 256 aa, synthetic construct
TIEVQRWEDKFEIKPGVWVYVPSVEARKVGGKILQAVRNKWIPPLYFYHLRTGGHLKAARLHLKSDFFAVVDIKQFFQSTSRSRITRDLKSYFTYSQAREISTFSTVRNLSHSPHKHVLPFGFVQSPILATLCLDKSYFGSLLRRLNKHHDLKLSVFMDDVIISSNNLAQLQAAYDEALVAMRKSGYQANMSKTQAPSSKISVFNLTLSKGVMKVTSQKMSDFLIDFQSSNYEPHRIGVKNYVEAVNPGQAKLFKL

SEQ ID NO: 1209 - protein, 256 aa, synthetic construct
TIEVQRWEDKFEIKPGVWVYVPSVEARKVGGKILQAVRNKWIPPLYFYHLRTGGHLKAARLHLKSDFFAVVDIQQFFQSTSRSRITRDLASYFTYSQAREISTFSTVRNLSHSPHKHVLPFGFVQSPILATLCLDKSYFGSLLRRLNKHHDLKLSVFMDDVIISSNNLAQLQAAYDEALVAMRKSGYQANMSKTQAPSSKISVFNLTLSKGVMKVTSQKMSDFLIKFYSSNYEPHRIGVKNYVEAVNPGQAKLFKL

SEQ ID NO: 1210 - protein, 256 aa, synthetic construct
TIEVQRWEDKFEIKPGVWVYVPSVEARKVGGKILQAVRNKWIPPLYFYHLRTGGHLKAARLHLKSDFFAVVDIKQFFQSTSRDRITRDLKSYFTYSQAREISTGSTVRNLSHSPHKHVLPFGFVQSPILATLCLDKSYFGSLLRRLNKHHDLKLSVFMDDVIISSNNLAQLQAAYDEALVAMRKSGYQANMSKTQAPSSKIFVFNLTLSKGVMKVTSQKMSDFLIDFYSSNYEPHRIGVKNYVEAVNPGQAKLFKL

SEQ ID NO: 1211 - protein, 256 aa, synthetic construct
TIEVQRWEDKFEIKPGVWVYVPSVEARKVGGKILQAVRNKWIPPLYFYHLRTGGHLKAARLHCKSDFFAVVDIKQFFQSTSRSRITRDLKSYFTYSQARAISTFSTVENLSHSPHKHVLPFGFVQSPILATLCLDKSYFGSLLRRVNKHHDLKLSVFMDDVIISSNNLAQLQAAYDEALVAMRKSGYQANMSKTQAPSSKISVFNLTLSKGVMKVTSQKMSDFLIDFYSSNYEPHRIGVKNYVEAVNPGQAKLFKL

SEQ ID NO: 1212 - protein, 256 aa, synthetic construct
TIEVQEWEDKKEIKPGVWVKVPSVEARKVGGKILQAVRNKWIPPLYFYHLRTGGHLKAARLHLKSDFFAVVDIKQFFQSTSRSRIQRDLKSYFTYNQAREISTFSTVRNLFHSPHKHVLPFGFLQSPILATLCLDKSYFGSLLRRLNKHNDLKLSVWMDDVIISSNNLAQLQAAYDEALVAMRKSGYQANMSKTQAPQSKISVFNLTLSKGNMKVTSQKMSDFLIDFYSHNYEPHRIGVKNYVEAVNPGQAKLFKL

SEQ ID NO: 1213 - protein, 256 aa, synthetic construct
TIEVQRWEDKFEIKPGVWVYVPSVEARKVGGKILQAVRNKWIPPLYFYHLRTGGHLKAARLHLKSDFFAVVDIKQFFQSTSRSRITRDLKSYFTYSQAREISTFSTVRNLSHSPHKHVLPFGFVQSPILATLCLDKSYFGSLLRRLNKHHDLKLSVFMDDVIISSNNLAQLQAAYDEALVAMRKIGYQANMSKTQAPSSKISVFNLTLSKGVMKVTSQKMSDFLIDFYSSNYEPHRIGVKNYVEAVNPGQAKLFKL

SEQ ID NO: 1214 - protein, 256 aa, synthetic construct
TIEVQRDEDKFEIKPGVWVYVPSVEARKVGGKILQAVRNKWIPPLYFYHLRTGGHLKAARLHLKSDFFAVVDIKQFFQSTSRSRITRDLKSYFTYSQAREISTFSTVRNLSHSPHKHVLPFGFVQSPILATLCLDKSYFGSLLRRLNKHHDLKLSVFMDDVIISSNNLAQLQAAYDEALVAMRKSGYQANMSKTQAPSSKISVFNLTLSKGVMKVTSQKMSDFLIDFYSSNYEPHRIGVKNYVEAVNPGQAKLFKL

SEQ ID NO: 1215 - protein, 256 aa, synthetic construct
TIEVQRWEDKFEIKPGVWVYVPSVEARKVGGKILQKVRNKWIPPLYFYHLRTGGHLKAARLHLKSDFFAVVDIKQFFQSTSRDRITRDLKSYFTYSQAREISTGSTVRNLSHSPHKHVLPFGFVQSPILATLCLDKSYFGSLLRRLNKHHDLKLSVFMDDVIISSNNLAQLQAAYDEALVAMRKSGYQANMSKTQAPSSKIFVFNLTLSKGVMKVTSQKMSDFLIDFYSSNYEPHRIGVKNYVEAVNPGQAKLFKL

SEQ ID NO: 1216 - protein, 256 aa, synthetic construct
TIEVQRWEDKFEIKPGVWVYVPSVEARKVGGKILQAVRNKWIPPLYFYHLRTGGHLKAARLHLKSDFFAVVDIKQFFQSTQRSRITRDLRSYFTYSQAREISTFSTVRNLSHSPHKHVLPFGFVQSPILATLCLDKSYFGSLLRRLNKHHDLKLSVFMDDVIISSNNLAQLQAAYDEALVAMRKSGYQANMSKTQAPSSKISVFNLTLSKGVMKVTSQKMSDFLIDFYSSNYEPHRIGVKNYVEAVNPEQAKLFKL

SEQ ID NO: 1217 - protein, 256 aa, synthetic construct
TIEVQRWEDKFEIKPGVWVYVPSVEARKVGGKILQAVRNKWIPPLYFYHLRTGGHLKAARLHLKSDFFAVVDIKQFFQSTSRSRITRDLKSYFTYSQAREISTFSTVRNLSHSPHKHVLPFGFVQSPILATLCLDKSYFGSLLRRLNKHHCLKLSVFMDDVIISSNNLAQLQAAYDEALVAMRKSGYQANMSKTQAPSSKISVFNLTLSKGVMKVTSQKMSDFLIDFYSSNYEPHRIGVKNYVEAVNPGQAKLFKL

SEQ ID NO: 1218 - protein, 256 aa, synthetic construct
TIEVQRWEDKFEIKPGVWVYVPSVEARKVGGKILQAVRNKWIPPLYFYHLRTGGHLAAARLHLKSDFFAVVDIKQFFQSTSRERITRDLKSYFTYSQAREISTFSTVRNLSHSPHKHVLPFGFVQSPILATLCLDKSYFGSLLRRLNKHHDLKLSVFMDDVIISSNNLAQLQAAYDEALVAMRKSGYQFNMSKTQAPSSKISVFNLTLSKGVMKVTSQKMSDFLIDFYSSNYEPHRIGVKNYVEAVNPGQAKLFKL

SEQ ID NO: 1219 - protein, 256 aa, synthetic construct
TIEVQRWEDKFEIKPGVWVYVPSEEARKVGGKILQAVRNKWIPPLYFYHLRTGGHLKAARLHLKSDFFAVVDIKQFFQSTSRSRIDRDLKSYFTYSQAREISTFSTVRNLSHSPHKHVLPFGFVQSPILATLCLDKSYFGSLLRRLNKHHDLKLSVFMDDVIISSNNLAQLQAAYDEALVAMRKSGYQINMSKTQAPSSKISVFNLTLSKGVMKVTSQKMSDFLIDFYSSNYEPHRIGVKNYVEAVNPGQAKLFKL

SEQ ID NO: 1220 - protein, 256 aa, synthetic construct
TIEVFRNRDKFEIKPGVWVYVPSVSARKVGGKSLQAVRNKWTPPLYFYHLRTGGHLKAARLHLKSDFFAVVDIKQFFQSTSRSRITRDLTSYFTYSQAREISTFSTVRCLSHSPHKHVLPWGFVQSPILATLCLDKSYFGSLLRRGNCHHDLKLSVFMDDVIISSNNLAQLQAAYDEALVAMRKSGYQANRSKTQAPSSKISVFNLTLSKGVMKVTSQKMSDFLISFASSNYEPHRIGVKNYVEAVNPNQAKLFKL

SEQ ID NO: 1221 - protein, 256 aa, synthetic construct
TIEVQRWEDKFEIKPGVWVYVPSVEARKVGGKILQAVRNKWIPPLYFYHLRTGGHLKAARLHLKSDFFAVVDIKQFFQSTSRSRIERDLKSYFTPSQAREISTFSTVRNLNHSPHKHVLPGGFVQSPILATLCLDKSPFGSLLRRLNKHHDLKLSVFMDDVIISSNNLAQLQAAYDEALVAMRKSGYQANMSKTQAPSSKISVFNLTLSKGVMKVTSQKMSDFLIDFYSSNYEPHRIGVKNYVEAVNPGQAKLFKL

SEQ ID NO: 1222 - protein, 256 aa, synthetic construct
TIEVQRWEDKFEIKPGVWVYVPSVEARKVGGKILQAVRNKWIPPLYFYHLRTGGHLKAARLHLKSDFFAVVDIKQFFQSTSRSRITQDLLSYFKESQAREISTFSTVRNLSHSPHKHVLPLGFVQSPILATLCLDKSPFGSLLRRLNKHHDLKLSVFMDDVIISSNNLAQLQAAYDEALVAMRKSGYQANMSKTQAPSSKISVFNLTLSKGVMKVTSQKMSDFLIDFYSSNYEPHRIGVKNYVEAVNPGQAKLFKL

SEQ ID NO: 1223 - protein, 256 aa, synthetic construct
TIEVQRWEDKFEIKPGVWVYVPSVEARKVGGKILQAVRNKWIPPLYFYHLRTGGHLKAARLHLKSDFFAVVDIKQFFQSTNRSRITRDLKSYFTYSQAREISTFSTVRNLSHSPHDHVLPLGFVQSPILATLCLDKSPFGSLLRRLNKHHDLKLSVFMDDVIISSNNLAQLQAAYDEALVAMRKSGYQANMSKTQAPSSKISVFNLTLSKGVMKVTSQKMSDFLIDFYSSNYEPHRIGVKNYVEAVNPGQAKLFKL

SEQ ID NO: 1224 - protein, 256 aa, synthetic construct
TIEVQRWEDKFEIKPGVWVYVPSVEARKVGGKILQAVRNKWIPPLYFYHLRTGGHLKAARLHLKSDFFAVVDIKQFFQSTSRSMITRDLKSYFTPSQAREISTFSTVRNLSHSPHKHVLPFGFVQSPILATLCLDKSPYGSLLRRLNKHHDLKLSVFMDDVIISSNNLAQLQAAYDEALVAMRKSGYQANMSKTQAPSSKISVFNLTLSKGVMKVTSQKMSDFLIDFYSSNYEPHRIGVKNYVEAVNPGQAKLFKL

SEQ ID NO: 1225 - protein, 256 aa, synthetic construct
TIEVQRWEDKFEIKPGVWVYVPSVEARKVGGKILQAVRNKWIPPLYFYHLRTGGHLKAARLHLKSDFFAVVDIKQFFQSTSRSLITRDLLSYFKYSQAREISTFSTVRNLSHSPHKHVLPLGFVQSPILATLCLDKSYFGSLLRRLNKHHDLKLSVFMDDVIISSNNLAQLQAAYDEALVAMRKSGYQANMSKTQAPSSKISVFNLTLSKGVMKVTSQKMSDFLIDFYSSNYEPHRIGVKNYVEAVNPGQAKLFKL

SEQ ID NO: 1226 - protein, 256 aa, synthetic construct
TIEVQRWEDKFEIKPGVWVYVPSVEARKVGGKILQAVRNKWIPPLYFYHLRTGGHLKAARLHLKSDFFAVVDIKQFFQSTSRSRITRDLKSYFTYSQAREISTFSTVRNLSHSPHDHVLPLGFVQSPILATLCLDKSPFGSLLRRLNKHHDLKLSVFMDDVIISSNNLAQLQAAYDEALVAMRKSGYQANMSKTQAPSSKISVFNLTLSKGVMKVTSQKMSDFLIDFYSSNYEPHRIGVKNYVEAVNPGQAKLFKL

SEQ ID NO: 1227 - protein, 256 aa, synthetic construct
TIEVQRWEDKFEKKPGVWVYVPSVEARKVGGKILQAVRNKWIPPLYFYHLRTGGHLKAARLHLKSDFFAVVDIKQFFQSTNRSRITRDLSSYFTPSQAREISTFSTVRNLSHSPHDHVLPLGFVQSPILATLCLDKSPFGSLLRRLNKHHDLKLSVFMDDVIISSNNLAQLQAAYDEALVAMRKSGYQANMSKTQAPSSKISVFNLTLSKGVMKVTSQKMSDFLIDFYSSNYEPHRIGVKNYVEAVNPGQAKLFKL

SEQ ID NO: 1228 - protein, 256 aa, synthetic construct
TIEVQRWEDKFEIKPGVCVYVPSVEARKVGGKILQAVRNKWIPPLYFYHLRTGGHLKAARLHLKSDFFAVVDIKQFFQSTSRSRITRDLKSYFTYSQAREISTFSTVRNLSHSPHKHVLPFGFVQSPILATLCLDKSYFGSLLRRLNKHHDLKLSVFMDDVIISSNNLAQLQAAYDEALVAMRKSGYQANMSKTQAPSSKISVFNLTLSKGVMKVTSQKMSDFLIDFYSSNYEPHRIGVKNYVEAVNPGQAKLFKL

SEQ ID NO: 1229 - protein, 256 aa, synthetic construct
TIEVQRWEDKFEKKPGVWVYVPSVEARKVGGKILQAVRNKWIPPLYFYHLRTGGHLKAARLHLKSDFFAVVDIKQFFQSTDRERITEDLKSYFTYSQAREISTFSTVRNLSHSPHKHVLPLGFVQSPILATLCLDKSYFGSLLRRLNKHHDLKLSVFMDDVIISSNNLAQLQAAYDEALVAMRKSGYQANMSKTQAPSSKISVFNLTLSKGVMKVTSQKMSDFLIDFYSSNYEPHRIGVKNYVEAVNPGQAKLFKL

SEQ ID NO: 1230 - protein, 256 aa, synthetic construct
TIEVQRWEDKFEKKPGVWVYVPSVEARKVGGKILQAVRNKWIPPLYFYHLRTGGHLKAARLHLKSDFFAVVDIKQFFQSTSRDMITRDLLSYFKYSQAREISTFSTVRNLSHSPHKHVLPLGFVQSPILATLCLDKSYFGSLLRRLNKHHDLKLSVFMDDVIISSNNLAQLQAAYDEALVAMRKSGYQANMSKTQAPSSKISVFNLTLSKGVMKVTSQKMSDFLIDFYSSNYEPHRIGVKNYVEAVNPGQAKLFKL

SEQ ID NO: 1231 - protein, 256 aa, synthetic construct
TIEVQRWEDKFEKKPGVWVYVPSVEARKVGGKILQAVRNKWIPPLYFYHLRTGGHLKAARLHLKSDFFAVVDIKQFFQSTSRDRITQDLKSYFTYSQAREISTFSTVRNLSHSPHKHVLPLGFVQSPILATLCLDKSPFGSLLRRLNKHHDLKLSVFMDDVIISSNNLAQLQAAYDEALVAMRKSGYQANMSKTQAPSSKISVFNLTLSKGVMKVTSQKMSDFLIDFYSSNYEPHRIGVKNYVEAVNPGQAKLFKL

SEQ ID NO: 1232 - protein, 256 aa, synthetic construct
TIEVQRWEDKFEIKPGVWVYVPSVEARKVGGKILQAVRNKWIPPLYFYHLRTGGHLKAARLHLKSDFFAVVDIKQFFQSTDRERITEDLKSYFTYSQAREISTFSTVRNLSHSPHKHVLPLGFVQSPILATLCLDKSYFGSLLRRLNKHHDLKLSVFMDDVIISSNNLAQLQAAYDEALVAMRKSGYQANMSKTQAPSSKISVFNLTLSKGVMKVTSQKMSDFLIDFYSSNYEPHRIGVKNYVEAVNPGQAKLFKL

SEQ ID NO: 1233 - protein, 256 aa, synthetic construct
TIEVQRWEDKFEIKPGVPVYVPSVEARKVGGKILQAVRNKWIPPLYFYHLRTGGHLKAARLHLKSDFFAVVDIKQFFQSTSRSRIERDLKSYFTQSQAREISTFSTVRNLNHSPHKHVLPGGFVQSPILATLCLDKSPFGSLLRRLNKHHDLKLSVFMDDVIISSNNLAQLQAAYDEALVAMRKSGYQANMSKTQAPSSKISVFNLTLSKGVMKVTSQKMSDFLIDFYSSNYEPHRIGVKNYVEAVNPGQAKLFKL

SEQ ID NO: 1234 - protein, 256 aa, synthetic construct
TIEVQRWEDKFEIKPGVPVYVPSVEARKVGGKILQAVRNKWIPPLYFYHLRTGGHLKAARLHLKSDFFAVVDIKQFFQSTCRSRITQDLKSYFTPSQAREISTFSTVRNLSHSPHKHVLPFGFVQSPILATLCLDKSPFGSLLRRLNKHHDLKLSVFMDDVIISSNNLAQLQAAYDEALVAMRKSGYQANMSKTQAPSSKISVFNLTLSKGVMKVTSQKMSDFLIDFYSSNYEPHRIGVKNYVEAVNPGQAKLFKL

SEQ ID NO: 1235 - protein, 256 aa, synthetic construct
TIEVQRWEDKFEIKPGVPVYVPSVEARKVGGKILQAVRNKWIPPLYFYHLRTGGHLKAARLHLKSDFFAVVDIKQFFQSTDRSRIERDLKSYFTYSQAREISTFSTVRNLSHSPHKHVLPLGFVQSPILATLCLDKSYFGSLLRRLNKHHDLKLSVFMDDVIISSNNLAQLQAAYDEALVAMRKSGYQANMSKTQAPSSKISVFNLTLSKGVMKVTSQKMSDFLIDFYSSNYEPHRIGVKNYVEAVNPGQAKLFKL

SEQ ID NO: 1236 - protein, 256 aa, synthetic construct
TIEVQRWEDKFEIKPGVPVYVPSVEARKVGGKILQAVRNKWIPPLYFYHLRTGGHLKAARLHLKSDFFAVVDIKQFFQSTNRARITRDLKSYFEYSQAEEISTFSTVRCLNHHPHDHVLPLGFVQSPILATLCLDKSPFGSLLRRLNKHHDLKLSVFMDDVIISSNNLAQLQAAYDEALVAMRKSGYQANMSKTQAPSSKISVFNLTLSKGVMKVTSQKMSDFLIDFYSSNYEPHRIGVKNYVEAVNPGQAKLFKL

SEQ ID NO: 1237 - protein, 256 aa, synthetic construct
TIEVQRWEDKFEIKPGVWVYVPSVEARKVGGKILQAVRNKWIPPLYFYHLRTGGHLKAARLHLKSDFFAVVDIKQFFQSTSRERITRDLKSYFTESQAREISTFSTVRCLSHSPHKHVLPLGFVQSPILATLCLDKSYFGSLLRRLNKHHDLKLSVFMDDVIISSNNLAQLQAAYDEALVAMRKSGYQANMSKTQAPSSKISVFNLTLSKGVMKVTSQKMSDFLNDFYSSNYEPHRIGVKNYVEAVNPGQAKLFKL

SEQ ID NO: 1238 - protein, 256 aa, synthetic construct
TIEVQRWEDKFEIKPGVWVYVPSVEARKVGGKILQAVRNKWIPPLYFYHLRTGGHLKAARLHLKSDFFAVVDIKQFFQSTSRSRIERDLKSYFTPSQAREISTFSTVRNLNHSPHKHVLPGGFVQSPILATLCLDKSPFGSLLRRLNKHHDLKLSVFMDDVIISSNNLAQLQAAYDEALVAMRKSGYQANMSKTQAPSSKISVFNLTLSKGVMKVTSQKMSDFLNDFYSSNYEPHRIGVKNYVEAVNPGQAKLFKL

SEQ ID NO: 1239 - protein, 256 aa, synthetic construct
TIEVQRWERKFEIKPGVWVYVPSVEARKVGTKILQAVRNKWIPPLYFYHLRTGGHLKAARLHLKSDFFAVVDIKQFFQSTSRQRITRDLKSYFTYSQAREISTFSTVRNLSHSPHKHGLPFGFVQSPILATLCLDKSYFGSLLRRLNKHHDLKLSVFMDDVIISSNNLAQLQAAYDEALVAMRKSGYQANMSKTQAPSSKISVFNLTLSKGVMKVTSQKMSDFLIDFYSSNYEPHRIGVKNYVEAVNPGQAKLFKL

SEQ ID NO: 1240 - protein, 256 aa, synthetic construct
TIEVQRWEDKFEIKPGVWVYVPSVEARKVGGKILQAVRNKWIPPLYFYHLRTGGHLKAARLHLKSDFFAVVDIKQFFQSTSRSRITQDLLSYFKESQAREISTFSTVRNLSHSPHKHVLPLGFVQSPILATLCLDKSPFGSLLRRLNKHHDLKLSVFMDDVIISSNNLAQLQAAYDEALVAMRKSGYQANMSKTQAPSSKISVFNLTLSKGVMKVTSQKMSDFLNDFYSSNYEPHRIGVKNYVEAVNPGQAKLFKL

SEQ ID NO: 1241 - protein, 256 aa, synthetic construct
TIEVQRWEDKFEIKPGVWVYVPSVEARKVGGKILQAVRNKWIPPLYFYHLRTGGHLKAARLHLKSDFFAVVDIKQFFQSTNRSRITRDLKSYFTYSQAREISTFSTVRNLSHSPHDHVLPLGFVQSPILATLCLDKSPFGSLLRRLNKHHDLKLSVFMDDVIISSNNLAQLQAAYDEALVAMRKSGYQANMSKTQAPSSKISVFNLTLSKGVMKVTSQKMSDFLNDFYSSNYEPHRIGVKNYVEAVNPGQAKLFKL

SEQ ID NO: 1242 - protein, 256 aa, synthetic construct
TIEVQRWEDKFEIKPGVWVYVPSVEARKVGGKILQAVRNKWIPPLYFYHLRTGGHLKAARLHLKSDFFAVVDIKQFFQSTSRSMITRDLKSYFTPSQAREISTFSTVRNLSHSPHKHVLPFGFVQSPILATLCLDKSPYGSLLRRLNKHHDLKLSVFMDDVIISSNNLAQLQAAYDEALVAMRKSGYQANMSKTQAPSSKISVFNLTLSKGVMKVTSQKMSDFLIDFNSSNYEPHRIGVKNYVEAVNPGQAKLFKL

SEQ ID NO: 1243 - protein, 256 aa, synthetic construct
TIEVQRWEDKFEIKPGVWVYVPSVEARKVGGKILQAVRNKWIPPLYFYHLRTGGHLKAARLHLKSDFFAVVDIKQFFQSTSRSLITRDLLSYFKYSQAREISTFSTVRNLSHSPHKHVLPLGFVQSPILATLCLDKSYFGSLLRRLNKHHDLKLSVFMDDVIISSNNLAQLQAAYDEALVAMRKSGYQANMSKTQAPSSKISVFNLTLSKGVMKVTSQKMSDFLIDFNSSNYEPHRIGVKNYVEAVNPGQAKLFKL

SEQ ID NO: 1244 - protein, 256 aa, synthetic construct
TIEVQRWEDKFEIKPGVWVYVPSVEARKVGGKILQAVRNKWIPPLYFYHLRTGGHLKAARLHLKSDFFAVVDIKQFFQSTSRDMITRDLLSYFKYSQAREISTFSTVRNLSHSPHKHVLPLGFVQSPILATLCLDKSYFGSLLRRLNKHHDLKLSVFMDDVIISSNNLAQLQAAYDEALVAMRKSGYQANMSKTQAPSSKISVFNLTLSKGVMKVTSQKMSDFLIDFYSSNYEPHRIGVKNYVEAVNPGQAKLFKL

SEQ ID NO: 1245 - protein, 256 aa, synthetic construct
TIEVQRWEDKFEIKPGVWVYVPSVEARKVGGKILQAVRNKWIPPLYFYHLRTGGHLKAARLHLKSDFFAVVDIKQFFQSTSRSRITRDLKSYFTYSQAREISTFSTVRNLSHSPHDHVLPLGFVQSPILATLCLDKSPFGSLLRRLNKHHDLKLSVFMDDVIISSNNLAQLQAAYDEALVAMRKSGYQANMSKTQAPSSKISVFNLTLSKGVMKVTSQKMSDFLIDFNSSNYEPHRIGVKNYVEAVNPGQAKLFKL

SEQ ID NO: 1246 - protein, 256 aa, synthetic construct
TIEVQRWEDKFEIKPGVWVYVPSVEARKVGGKILQAVRNKWIPPLYFYHLRTGGHLKAARLHLKSDFFAVVDIKQFFQSTNRSRITRDLSSYFTPSQAREISTFSTVRNLSHSPHDHVLPLGFVQSPILATLCLDKSPFGSLLRRLNKHHDLKLSVFMDDVIISSNNLAQLQAAYDEALVAMRKSGYQANMSKTQAPSSKISVFNLTLSKGVMKVTSQKMSDFLNDFNSSNYEPHRIGVKNYVEAVNPGQAKLFKL

SEQ ID NO: 1247 - protein, 256 aa, synthetic construct
TIEVQRWEDKFEIKPGVWVYVPSVEARKVGGKILQAVRNKWIPPLYFYHLRTGGHLKAARLHLKSDFFAVVDIKQFFQSTDRERITEDLKSYFTYSQAREISTFSTVRNLSHSPHKHVLPLGFVQSPILATLCLDKSYFGSLLRRLNKHHDLKLSVFMDDVIISSNNLAQLQAAYDEALVAMRKSGYQANMSKTQAPSSKISVFNLTLSKGVMKVTSQKMSDFLNDFNSSNYEPHRIGVKNYVEAVNPGQAKLFKL

SEQ ID NO: 1248 - protein, 256 aa, synthetic construct
TIEVQRWEDKFEIKPGVWVYVPSVEARKVGGKILQAVRNKWIPPLYFYHLRTGGHLKAARLHLKSDFFAVVDIKQFFQSTSRDMITRDLLSYFKYSQAREISTFSTVRNLSHSPHKHVLPLGFVQSPILATLCLDKSYFGSLLRRLNKHHDLKLSVFMDDVIISSNNLAQLQAAYDEALVAMRKSGYQANMSKTQAPSSKISVFNLTLSKGVMKVTSQKMSDFLNDFNSSNYEPHRIGVKNYVEAVNPGQAKLFKL

SEQ ID NO: 1249 - protein, 256 aa, synthetic construct
TIEVQRWEDKFEIKPGVWVYVPSVEARKVGGKILQAVRNKWIPPLYFYHLRTGGHLKAARLHLKSDFFAVVDIKQFFQSTSRDRITQDLKSYFTYSQAREISTFSTVRNLSHSPHKHVLPLGFVQSPILATLCLDKSPFGSLLRRLNKHHDLKLSVFMDDVIISSNNLAQLQAAYDEALVAMRKSGYQANMSKTQAPSSKISVFNLTLSKGVMKVTSQKMSDFLNDFNSSNYEPHRIGVKNYVEAVNPGQAKLFKL

SEQ ID NO: 1250 - protein, 256 aa, synthetic construct
TIEVQRWEDKFEIKPGVWVYVPSVEARKVGGKILQAVRNKWIPPLYFYHLRTGGHLKAARLHLKSDFFAVVDIKQFFQSTSRSRITRDLKSYFTYSQAREISTFSTVRNLSHSIHKHVLPFGFVQSPILATLCLDKSYFGSLLRRLNKNHDLKLSVFMDDVIISSNNLAQLQAAYDEALVAMRKSGYQANMSKTQAPSSKINVFNLTLSKGVMKVTSQKMSDFLIDFYSSNYEPHRIGVKNYVEAVNPGQAKLFKL

SEQ ID NO: 1251 - protein, 256 aa, synthetic construct
TIEVQRWEDKFEIKPGVWVYVPSVEARKVGGKILQAVRNKWIPPLYFYHLRTGGHLKAARLHLKSDFFAVVDIKQFFQSTSRSRIERDLKSYFTQSQAREISTFSTVRNLNHSPHKHVLPGGFVQSPILATLCLDKSPFGSLLRRLNKHHDLKLSVFMDDVIISSNNLAQLQAAYDEALVAMRKSGYQANMSKTQAPSSKISVFNLTLSKGVMKVTSQKMSDFLNDFNSSNYEPHRIGVKNYVEAVNPGQAKLFKL

SEQ ID NO: 1252 - protein, 256 aa, synthetic construct
TIEVQRWEDKFEIKPGVWVYVPSVEARKVGGKILQAVRNKWIPPLYFYHLRTGGHLKAARLHLKSDFFAVVDIKQFFQSTCRSRITQDLKSYFTPSQAREISTFSTVRNLSHSPHKHVLPFGFVQSPILATLCLDKSPFGSLLRRLNKHHDLKLSVFMDDVIISSNNLAQLQAAYDEALVAMRKSGYQANMSKTQAPSSKISVFNLTLSKGVMKVTSQKMSDFLNDFNSSNYEPHRIGVKNYVEAVNPGQAKLFKL

SEQ ID NO: 1253 - protein, 256 aa, synthetic construct
TIEVQRWEDKFEIKPGVWVYVPSVEARKVGGKILQAVRNKWIPPLYFYHLRTGGHLKAARLHLKSDFFAVVDIKQFFQSTDRSRIERDLKSYFTYSQAREISTFSTVRNLSHSPHKHVLPLGFVQSPILATLCLDKSYFGSLLRRLNKHHDLKLSVFMDDVIISSNNLAQLQAAYDEALVAMRKSGYQANMSKTQAPSSKISVFNLTLSKGVMKVTSQKMSDFLNDFNSSNYEPHRIGVKNYVEAVNPGQAKLFKL

SEQ ID NO: 1254 - protein, 256 aa, synthetic construct
TIEVQRWEDKFEIKPGVWVYVPSVEARKVGGKILQAVRNKWIPPLYFYHLRTGGHLKAARLHLKSDFFAVVDIKQFFQSTNRARITRDLKSYFEYSQAEEISTFSTVRCLNHHPHDHVLPLGFVQSPILATLCLDKSPFGSLLRRLNKHHDLKLSVFMDDVIISSNNLAQLQAAYDEALVAMRKSGYQANMSKTQAPSSKISVFNLTLSKGVMKVTSQKMSDFLNDFNSSNYEPHRIGVKNYVEAVNPGQAKLFKL

SEQ ID NO: 1255 - protein, 256 aa, synthetic construct
TIEVQRWEDKFEKKPGVPVYVPSVEARKVGGKILQAVRNKWIPPLYFYHLRTGGHLKAARLHLKSDFFAVVDIKQFFQSTSRERITRDLKSYFTESQAREISTFSTVRCLSHSPHKHVLPLGFVQSPILATLCLDKSYFGSLLRRLNKHHDLKLSVFMDDVIISSNNLAQLQAAYDEALVAMRKSGYQANMSKTQAPSSKISVFNLTLSKGVMKVTSQKMSDFLIDFYSSNYEPHRIGVKNYVEAVNPGQAKLFKL

SEQ ID NO: 1256 - protein, 256 aa, synthetic construct
TIEVQRWEDKFEIKPGVWVYVPSVEARKVGGKILQAVRNKWIPPLYFYHLRTGGHLKAARLHLKSDFFAVVDIKQFFQSTSRDRITQDLKSYFTYSQAREISTFSTVRNLSHSPHKHVLPLGFVQSPILATLCLDKSPFGSLLRRLNKHHDLKLSVFMDDVIISSNNLAQLQAAYDEALVAMRKSGYQANMSKTQAPSSKISVFNLTLSKGVMKVTSQKMSDFLIDFYSSNYEPHRIGVKNYVEAVNPGQAKLFKL

SEQ ID NO: 1257 - protein, 256 aa, synthetic construct
TIEVQRWEDKFEKKPGVPVYVPSVEARKVGGKILQAVRNKWIPPLYFYHLRTGGHLKAARLHLKSDFFAVVDIKQFFQSTSRSRIERDLKSYFTPSQAREISTFSTVRNLNHSPHKHVLPGGFVQSPILATLCLDKSPFGSLLRRLNKHHDLKLSVFMDDVIISSNNLAQLQAAYDEALVAMRKSGYQANMSKTQAPSSKISVFNLTLSKGVMKVTSQKMSDFLIDFYSSNYEPHRIGVKNYVEAVNPGQAKLFKL

SEQ ID NO: 1258 - protein, 256 aa, synthetic construct
TIEVQRWEDKFEKKPGVPVYVPSVEARKVGGKILQAVRNKWIPPLYFYHLRTGGHLKAARLHLKSDFFAVVDIKQFFQSTSRSRITQDLLSYFKESQAREISTFSTVRNLSHSPHKHVLPLGFVQSPILATLCLDKSPFGSLLRRLNKHHDLKLSVFMDDVIISSNNLAQLQAAYDEALVAMRKSGYQANMSKTQAPSSKISVFNLTLSKGVMKVTSQKMSDFLIDFYSSNYEPHRIGVKNYVEAVNPGQAKLFKL

SEQ ID NO: 1259 - protein, 256 aa, synthetic construct
TIEVQRWEDKFEKKPGVPVYVPSVEARKVGGKILQAVRNKWIPPLYFYHLRTGGHLKAARLHLKSDFFAVVDIKQFFQSTNRSRITRDLKSYFTYSQAREISTFSTVRNLSHSPHDHVLPLGFVQSPILATLCLDKSPFGSLLRRLNKHHDLKLSVFMDDVIISSNNLAQLQAAYDEALVAMRKSGYQANMSKTQAPSSKISVFNLTLSKGVMKVTSQKMSDFLIDFYSSNYEPHRIGVKNYVEAVNPGQAKLFKL

SEQ ID NO: 1260 - protein, 256 aa, synthetic construct
TIEVQRWEDKFEKKPGVPVYVPSVEARKVGGKILQAVRNKWIPPLYFYHLRTGGHLKAARLHLKSDFFAVVDIKQFFQSTSRSMITRDLKSYFTPSQAREISTFSTVRNLSHSPHKHVLPFGFVQSPILATLCLDKSPYGSLLRRLNKHHDLKLSVFMDDVIISSNNLAQLQAAYDEALVAMRKSGYQANMSKTQAPSSKISVFNLTLSKGVMKVTSQKMSDFLIDFYSSNYEPHRIGVKNYVEAVNPGQAKLFKL

SEQ ID NO: 1261 - protein, 256 aa, synthetic construct
TIEVQRWEDKFEIKPGVWVYVPSVEARKVGGKILQAVRNKWIPPLYFYHLRTGGHLKAARLHLKSDFFAVVDIKQFFQSTSRSRITRDLKSYFTYSQAREISTFSTVRNLSHSPHKHVLPFGFVQSPILATLCLDKSYFGSLLRRLNKHHDLKLSVFMDDVIISSNNLAQLQAAYDEALVAMRKSRYQANMSKTQAPSSKISVFNLTLSKGVMKVTSQKMSDFLIDFYSSNYEPHRIGVKNYVEAVNPGQAKLFKL

SEQ ID NO: 1262 - protein, 256 aa, synthetic construct
TIEVQRWEDKFEKKPGVPVYVPSVEARKVGGKILQAVRNKWIPPLYFYHLRTGGHLKAARLHLKSDFFAVVDIKQFFQSTSRSLITRDLLSYFKYSQAREISTFSTVRNLSHSPHKHVLPLGFVQSPILATLCLDKSYFGSLLRRLNKHHDLKLSVFMDDVIISSNNLAQLQAAYDEALVAMRKSGYQANMSKTQAPSSKISVFNLTLSKGVMKVTSQKMSDFLIDFYSSNYEPHRIGVKNYVEAVNPGQAKLFKL

SEQ ID NO: 1263 - protein, 256 aa, synthetic construct
TIEVQRWEDKFEKKPGVPVYVPSVEARKVGGKILQAVRNKWIPPLYFYHLRTGGHLKAARLHLKSDFFAVVDIKQFFQSTSRSRITRDLKSYFTYSQAREISTFSTVRNLSHSPHDHVLPLGFVQSPILATLCLDKSPFGSLLRRLNKHHDLKLSVFMDDVIISSNNLAQLQAAYDEALVAMRKSGYQANMSKTQAPSSKISVFNLTLSKGVMKVTSQKMSDFLIDFYSSNYEPHRIGVKNYVEAVNPGQAKLFKL

SEQ ID NO: 1264 - protein, 256 aa, synthetic construct
TIEVQRWEDKFEKKPGVWVYVPSVEARKVGGKILQAVRNKWIPPLYFYHLRTGGHLKAARLHLKSDFFAVVDIKQFFQSTNRSRITRDLSSYFTPSQAREISTFSTVRNLSHSPHDHVLPLGFVQSPILATLCLDKSPFGSLLRRLNKHHDLKLSVFMDDVIISSNNLAQLQAAYDEALVAMRKSGYQANMSKTQAPSSKISVFNLTLSKGVMKVTSQKMSDFLIDFNSSNYEPHRIGVKNYVEAVNPGQAKLFKL

SEQ ID NO: 1265 - protein, 256 aa, synthetic construct
TIEVQRWEDKFEKKPGVWVYVPSVEARKVGGKILQAVRNKWIPPLYFYHLRTGGHLKAARLHLKSDFFAVVDIKQFFQSTDRERITEDLKSYFTYSQAREISTFSTVRNLSHSPHKHVLPLGFVQSPILATLCLDKSYFGSLLRRLNKHHDLKLSVFMDDVIISSNNLAQLQAAYDEALVAMRKSGYQANMSKTQAPSSKISVFNLTLSKGVMKVTSQKMSDFLIDFNSSNYEPHRIGVKNYVEAVNPGQAKLFKL

SEQ ID NO: 1266 - protein, 256 aa, synthetic construct
TIEVQRWEDKFEKKPGVWVYVPSVEARKVGGKILQAVRNKWIPPLYFYHLRTGGHLKAARLHLKSDFFAVVDIKQFFQSTSRDMITRDLLSYFKYSQAREISTFSTVRNLSHSPHKHVLPLGFVQSPILATLCLDKSYFGSLLRRLNKHHDLKLSVFMDDVIISSNNLAQLQAAYDEALVAMRKSGYQANMSKTQAPSSKISVFNLTLSKGVMKVTSQKMSDFLNDFYSSNYEPHRIGVKNYVEAVNPGQAKLFKL

SEQ ID NO: 1267 - protein, 256 aa, synthetic construct
TIEVQRWEDKFEKKPGVWVYVPSVEARKVGGKILQAVRNKWIPPLYFYHLRTGGHLKAARLHLKSDFFAVVDIKQFFQSTSRDRITQDLKSYFTYSQAREISTFSTVRNLSHSPHKHVLPLGFVQSPILATLCLDKSPFGSLLRRLNKHHDLKLSVFMDDVIISSNNLAQLQAAYDEALVAMRKSGYQANMSKTQAPSSKISVFNLTLSKGVMKVTSQKMSDFLNDFYSSNYEPHRIGVKNYVEAVNPGQAKLFKL

SEQ ID NO: 1268 - protein, 256 aa, synthetic construct
TIEVQRWEDKFEIKPGVWVYVPSVEARKVGGKILQAVRNKWIPPLYFYHLRTGGHLKAARLHLKSDFFAVVDIKQFFQSTSRSRIERDLKSYFTQSQAREISTFSTVRNLNHSPHKHVLPGGFVQSPILATLCLDKSPFGSLLRRLNKHHDLKLSVFMDDVIISSNNLAQLQAAYDEALVAMRKSGYQANMSKTQAPSSKISVFNLTLSKGVMKVTSQKMSDFLIDFYSSNYEPHRIGVKNYVEAVNPGQAKLFKL

SEQ ID NO: 1269 - protein, 256 aa, synthetic construct
TIEVQRWEDKFEIKPGVPVYVPSVEARKVGGKILQAVRNKWIPPLYFYHLRTGGHLKAARLHLKSDFFAVVDIKQFFQSTSRSRIERDLKSYFTQSQAREISTFSTVRNLNHSPHKHVLPGGFVQSPILATLCLDKSPFGSLLRRLNKHHDLKLSVFMDDVIISSNNLAQLQAAYDEALVAMRKSGYQANMSKTQAPSSKISVFNLTLSKGVMKVTSQKMSDFLIDFNSSNYEPHRIGVKNYVEAVNPGQAKLFKL

SEQ ID NO: 1270 - protein, 256 aa, synthetic construct
TIEVQRWEDKFEIKPGVPVYVPSVEARKVGGKILQAVRNKWIPPLYFYHLRTGGHLKAARLHLKSDFFAVVDIKQFFQSTCRSRITQDLKSYFTPSQAREISTFSTVRNLSHSPHKHVLPFGFVQSPILATLCLDKSPFGSLLRRLNKHHDLKLSVFMDDVIISSNNLAQLQAAYDEALVAMRKSGYQANMSKTQAPSSKISVFNLTLSKGVMKVTSQKMSDFLIDFNSSNYEPHRIGVKNYVEAVNPGQAKLFKL

SEQ ID NO: 1271 - protein, 256 aa, synthetic construct
TIEVQRWEDKFEIKPGVPVYVPSVEARKVGGKILQAVRNKWIPPLYFYHLRTGGHLKAARLHLKSDFFAVVDIKQFFQSTDRSRIERDLKSYFTYSQAREISTFSTVRNLSHSPHKHVLPLGFVQSPILATLCLDKSYFGSLLRRLNKHHDLKLSVFMDDVIISSNNLAQLQAAYDEALVAMRKSGYQANMSKTQAPSSKISVFNLTLSKGVMKVTSQKMSDFLNDFYSSNYEPHRIGVKNYVEAVNPGQAKLFKL

SEQ ID NO: 1272 - protein, 256 aa, synthetic construct
TIEVQRWEDKFEIKPGVWVYVPSVEARKVGGKILQAVRNKWIPPLYFYHLRTGGHLKAARLHLKSDFFAVVDIKQFFQSTSRSRITRDLKSYFTYSQAQEISTFSTVRNLSHSPHKHVLPFGFVQSPILATLCLDKSYFGSLLRRLNKHHDLKLSVFMDDVIISSNNLAQLQAAYDEALVAMRKSGYQANMSKTQAPSSKISVFNLTLSKGVMKVTSQKMSDFLIDFYSSNYEPHRIGVKNYVEAVNPGQAKLFKL

SEQ ID NO: 1273 - protein, 256 aa, synthetic construct
TIEVQRWEDKFEIKPGVPVYVPSVEARKVGGKILQAVRNKWIPPLYFYHLRTGGHLKAARLHLKSDFFAVVDIKQFFQSTNRARITRDLKSYFEYSQAEEISTFSTVRCLNHHPHDHVLPLGFVQSPILATLCLDKSPFGSLLRRLNKHHDLKLSVFMDDVIISSNNLAQLQAAYDEALVAMRKSGYQANMSKTQAPSSKISVFNLTLSKGVMKVTSQKMSDFLNDFYSSNYEPHRIGVKNYVEAVNPGQAKLFKL

SEQ ID NO: 1274 - protein, 256 aa, synthetic construct
TIEVQRWEDKFEKKPGVWVYVPSVEARKVGGKILQAVRNKWIPPLYFYHLRTGGHLKAARLHLKSDFFAVVDIKQFFQSTSRERITRDLKSYFTESQAREISTFSTVRCLSHSPHKHVLPLGFVQSPILATLCLDKSYFGSLLRRLNKHHDLKLSVFMDDVIISSNNLAQLQAAYDEALVAMRKSGYQANMSKTQAPSSKISVFNLTLSKGVMKVTSQKMSDFLIDFNSSNYEPHRIGVKNYVEAVNPGQAKLFKL

SEQ ID NO: 1275 - protein, 256 aa, synthetic construct
TIEVQRWEDKFEKKPGVWVYVPSVEARKVGGKILQAVRNKWIPPLYFYHLRTGGHLKAARLHLKSDFFAVVDIKQFFQSTSRSRITQDLLSYFKESQAREISTFSTVRNLSHSPHKHVLPLGFVQSPILATLCLDKSPFGSLLRRLNKHHDLKLSVFMDDVIISSNNLAQLQAAYDEALVAMRKSGYQANMSKTQAPSSKISVFNLTLSKGVMKVTSQKMSDFLNDFYSSNYEPHRIGVKNYVEAVNPGQAKLFKL

SEQ ID NO: 1276 - protein, 256 aa, synthetic construct
TIEVQRWEDKFEKKPGVWVYVPSVEARKVGGKILQAVRNKWIPPLYFYHLRTGGHLKAARLHLKSDFFAVVDIKQFFQSTNRSRITRDLKSYFTYSQAREISTFSTVRNLSHSPHDHVLPLGFVQSPILATLCLDKSPFGSLLRRLNKHHDLKLSVFMDDVIISSNNLAQLQAAYDEALVAMRKSGYQANMSKTQAPSSKISVFNLTLSKGVMKVTSQKMSDFLNDFYSSNYEPHRIGVKNYVEAVNPGQAKLFKL

SEQ ID NO: 1277 - protein, 256 aa, synthetic construct
TIEVQRWEDKFEIKPGVPVYVPSVEARKVGGKILQAVRNKWIPPLYFYHLRTGGHLKAARLHLKSDFFAVVDIKQFFQSTSRSMITRDLKSYFTPSQAREISTFSTVRNLSHSPHKHVLPFGFVQSPILATLCLDKSPYGSLLRRLNKHHDLKLSVFMDDVIISSNNLAQLQAAYDEALVAMRKSGYQANMSKTQAPSSKISVFNLTLSKGVMKVTSQKMSDFLIDFNSSNYEPHRIGVKNYVEAVNPGQAKLFKL

SEQ ID NO: 1278 - protein, 256 aa, synthetic construct
TIEVQRWEDKFEIKPGVPVYVPSVEARKVGGKILQAVRNKWIPPLYFYHLRTGGHLKAARLHLKSDFFAVVDIKQFFQSTSRSLITRDLLSYFKYSQAREISTFSTVRNLSHSPHKHVLPLGFVQSPILATLCLDKSYFGSLLRRLNKHHDLKLSVFMDDVIISSNNLAQLQAAYDEALVAMRKSGYQANMSKTQAPSSKISVFNLTLSKGVMKVTSQKMSDFLIDFNSSNYEPHRIGVKNYVEAVNPGQAKLFKL

SEQ ID NO: 1279 - protein, 256 aa, synthetic construct
TIEVQRWEDKFEIKPGVWVYVPSVEARKVGGKILQAVRNKWIPPLYFYHLRTGGHLKAARLHLKSDFFAVVDIKQFFQSTCRSRITQDLKSYFTPSQAREISTFSTVRNLSHSPHKHVLPFGFVQSPILATLCLDKSPFGSLLRRLNKHHDLKLSVFMDDVIISSNNLAQLQAAYDEALVAMRKSGYQANMSKTQAPSSKISVFNLTLSKGVMKVTSQKMSDFLIDFYSSNYEPHRIGVKNYVEAVNPGQAKLFKL

SEQ ID NO: 1280 - protein, 256 aa, synthetic construct
TIEVQRWEDKFEIKPGVPVYVPSVEARKVGGKILQAVRNKWIPPLYFYHLRTGGHLKAARLHLKSDFFAVVDIKQFFQSTSRSRITRDLKSYFTYSQAREISTFSTVRNLSHSPHDHVLPLGFVQSPILATLCLDKSPFGSLLRRLNKHHDLKLSVFMDDVIISSNNLAQLQAAYDEALVAMRKSGYQANMSKTQAPSSKISVFNLTLSKGVMKVTSQKMSDFLNDFYSSNYEPHRIGVKNYVEAVNPGQAKLFKL

SEQ ID NO: 1281 - protein, 256 aa, synthetic construct
TIEVQRWEDKFEIKPGVWVYVPSVEARKVGGKILQAVRNKWIPPLYFYHLRTGGHLKAARLHLKSDFFAVVDIKQFFQSTDRSRIERDLKSYFTYSQAREISTFSTVRNLSHSPHKHVLPLGFVQSPILATLCLDKSYFGSLLRRLNKHHDLKLSVFMDDVIISSNNLAQLQAAYDEALVAMRKSGYQANMSKTQAPSSKISVFNLTLSKGVMKVTSQKMSDFLIDFYSSNYEPHRIGVKNYVEAVNPGQAKLFKL

SEQ ID NO: 1282 - protein, 256 aa, synthetic construct
TIEVQRWEDKFEIKPGVWVYVPSVEARKVGGKILQAVRNKWIPPLYFYHLRTGGHLKAARLHLKSDFFAVVDIKQFFQSTNRARITRDLKSYFEYSQAEEISTFSTVRCLNHHPHDHVLPLGFVQSPILATLCLDKSPFGSLLRRLNKHHDLKLSVFMDDVIISSNNLAQLQAAYDEALVAMRKSGYQANMSKTQAPSSKISVFNLTLSKGVMKVTSQKMSDFLIDFYSSNYEPHRIGVKNYVEAVNPGQAKLFKL

SEQ ID NO: 1283 - protein, 256 aa, synthetic construct
TIEVQRWEDKFEIKPGVWVYVPSVEARKVGGKILQAVRNKWIPPLYFYHLRTGGHLKAARLHLKSDFFAVVDIKQFFQSTSRSRITRDLKSYFTYSQAREISTFSTVRNLSHSPHSHVLPFGFVQSPILATLCLDKSYFGSLLRRLNKHHDLKLSVFMDDVIISSNNLAQLQAAYDEALVAMRKSGYQANMSKTQAPSSKISVFNLTLSKGVMKVTSQKMSDFLIDFYSSNYEPHRIGVKNYVEAVNPGQAKLFKL

SEQ ID NO: 1284 - protein, 256 aa, synthetic construct
TIEVQRWEDKFEIKPGVWVYVPSVEARKVGGKILQAVRNKWIPPLYFYHLRTGGHLKAARLHLKSDFFAVVDIKQFFQSTSRERITRDLKSYFTESQAREISTFSTVRCLSHSPHKHVLPLGFVQSPILATLCLDKSYFGSLLRRLNKHHDLKLSVFMDDVIISSNNLAQLQAAYDEALVAMRKSGYQANMSKTQAPSSKISVFNLTLSKGVMKVTSQKMSDFLIDFYSSNYEPHRIGVKNYVEAVNPGQAKLFKL

SEQ ID NO: 1285 - protein, 1696 aa, synthetic construct
MKRTADGSEFESPKKKRKVDKKYSIGLDIGTNSVGWAVITDEYKVPSKKFKVLGNTDRHSIKKNLIGALLFDSGETAEATRLKRTARRRYTRRKNRICYLQEIFSNEMAKVDDSFFHRLEESFLVEEDKKHERHPIFGNIVDEVAYHEKYPTIYHLRKKLVDSTDKADLRLIYLALAHMIKFRGHFLIEGDLNPDNSDVDKLFIQLVQTYNQLFEENPINASGVDAKAILSARLSKSRRLENLIAQLPGEKKNGLFGNLIALSLGLTPNFKSNFDLAEDAKLQLSKDTYDDDLDNLLAQIGDQYADLFLAAKNLSDAILLSDILRVNTEITKAPLSASMIKRYDEHHQDLTLLKALVRQQLPEKYKEIFFDQSKNGYAGYIDGGASQEEFYKFIKPILEKMDGTEELLVKLNREDLLRKQRTFDNGSIPHQIHLGELHAILRRQEDFYPFLKDNREKIEKILTFRIPYYVGPLARGNSRFAWMTRKSEETITPWNFEEVVDKGASAQSFIERMTNFDKNLPNEKVLPKHSLLYEYFTVYNELTKVKYVTEGMRKPAFLSGEQKKAIVDLLFKTNRKVTVKQLKEDYFKKIECFDSVEISGVEDRFNASLGTYHDLLKIIKDKDFLDNEENEDILEDIVLTLTLFEDREMIEERLKTYAHLFDDKVMKQLKRRRYTGWGRLSRKLINGIRDKQSGKTILDFLKSDGFANRNFMQLIHDDSLTFKEDIQKAQVSGQGDSLHEHIANLAGSPAIKKGILQTVKVVDELVKVMGRHKPENIVIEMARENQTTQKGQKNSRERMKRIEEGIKELGSQILKEHPVENTQLQNEKLYLYYLQNGRDMYVDQELDINRLSDYDVDAIVPQSFLKDDSIDNKVLTRSDKNRGKSDNVPSEEVVKKMKNYWRQLLNAKLITQRKFDNLTKAERGGLSELDKAGFIKRQLVETRQITKHVAQILDSRMNTKYDENDKLIREVKVITLKSKLVSDFRKDFQFYKVREINNYHHAHDAYLNAVVGTALIKKYPKLESEFVYGDYKVYDVRKMIAKSEQEIGKATAKYFFYSNIMNFFKTEITLANGEIRKRPLIETNGETGEIVWDKGRDFATVRKVLSMPQVNIVKKTEVQTGGFSKESILPKRNSDKLIARKKDWDPKKYGGFDSPTVAYSVLVVAKVEKGKSKKLKSVKELLGITIMERSSFEKNPIDFLEAKGYKEVKKDLIIKLPKYSLFELENGRKRMLASAGELQKGNELALPSKYVNFLYLASHYEKLKGSPEDNEQKQLFVEQHKHYLDEIIEQISEFSKRVILADANLDKVLSAYNKHRDKPIREQAENIIHLFTLTNLGAPAAFKYFDTTIDRKRYTSTKEVLDATLIHQSITGLYETRIDLSQLGGDSGGSSGGSSGSETPGTSESATPESSGGSSGGSSTIEVQRWEDKFEIKPGVWVYVPSVEARKVGGKILQAVRNKWIPPLYFYHLRTGGHLKAARLHLKSDFFAVVDIKQFFQSTSRSRITRDLKSYFTYSQAREISTFSTVRNLSHSIHKHVLPFGFVQSPILATLCLDKSYFGSLLRRLNKNHDLKLSVFMDDVIISSNNLAQLQAAYDEALVAMRKSGYQANMSKTQAPSSKISVFNLTLSKGVMKVTSQKMSDFLIDFYSSNYEPHRIGVKNYVEAVNPGQAKLFKLSGGSKRTADGSEFEPKKKRKV

SEQ ID NO: 1286 - protein, 1696 aa, synthetic construct
MKRTADGSEFESPKKKRKVDKKYSIGLDIGTNSVGWAVITDEYKVPSKKFKVLGNTDRHSIKKNLIGALLFDSGETAEATRLKRTARRRYTRRKNRICYLQEIFSNEMAKVDDSFFHRLEESFLVEEDKKHERHPIFGNIVDEVAYHEKYPTIYHLRKKLVDSTDKADLRLIYLALAHMIKFRGHFLIEGDLNPDNSDVDKLFIQLVQTYNQLFEENPINASGVDAKAILSARLSKSRRLENLIAQLPGEKKNGLFGNLIALSLGLTPNFKSNFDLAEDAKLQLSKDTYDDDLDNLLAQIGDQYADLFLAAKNLSDAILLSDILRVNTEITKAPLSASMIKRYDEHHQDLTLLKALVRQQLPEKYKEIFFDQSKNGYAGYIDGGASQEEFYKFIKPILEKMDGTEELLVKLNREDLLRKQRTFDNGSIPHQIHLGELHAILRRQEDFYPFLKDNREKIEKILTFRIPYYVGPLARGNSRFAWMTRKSEETITPWNFEEVVDKGASAQSFIERMTNFDKNLPNEKVLPKHSLLYEYFTVYNELTKVKYVTEGMRKPAFLSGEQKKAIVDLLFKTNRKVTVKQLKEDYFKKIECFDSVEISGVEDRFNASLGTYHDLLKIIKDKDFLDNEENEDILEDIVLTLTLFEDREMIEERLKTYAHLFDDKVMKQLKRRRYTGWGRLSRKLINGIRDKQSGKTILDFLKSDGFANRNFMQLIHDDSLTFKEDIQKAQVSGQGDSLHEHIANLAGSPAIKKGILQTVKVVDELVKVMGRHKPENIVIEMARENQTTQKGQKNSRERMKRIEEGIKELGSQILKEHPVENTQLQNEKLYLYYLQNGRDMYVDQELDINRLSDYDVDAIVPQSFLKDDSIDNKVLTRSDKNRGKSDNVPSEEVVKKMKNYWRQLLNAKLITQRKFDNLTKAERGGLSELDKAGFIKRQLVETRQITKHVAQILDSRMNTKYDENDKLIREVKVITLKSKLVSDFRKDFQFYKVREINNYHHAHDAYLNAVVGTALIKKYPKLESEFVYGDYKVYDVRKMIAKSEQEIGKATAKYFFYSNIMNFFKTEITLANGEIRKRPLIETNGETGEIVWDKGRDFATVRKVLSMPQVNIVKKTEVQTGGFSKESILPKRNSDKLIARKKDWDPKKYGGFDSPTVAYSVLVVAKVEKGKSKKLKSVKELLGITIMERSSFEKNPIDFLEAKGYKEVKKDLIIKLPKYSLFELENGRKRMLASAGELQKGNELALPSKYVNFLYLASHYEKLKGSPEDNEQKQLFVEQHKHYLDEIIEQISEFSKRVILADANLDKVLSAYNKHRDKPIREQAENIIHLFTLTNLGAPAAFKYFDTTIDRKRYTSTKEVLDATLIHQSITGLYETRIDLSQLGGDSGGSSGGSSGSETPGTSESATPESSGGSSGGSSTIEVQRWEDKFEIKPGVWVYVPSVEARKVGGKILQAVRNKWIPPLYFYHLRTGGHLKAARLHLKSDFFAVVDIKQFFQSTNRSRITRDLCSYFTYSQAREISTFSTVRCLSHSPHKHVLPFGFVQSPILATLCLDKSYFGSLLRRLNKHHDLKLSVFMDDVIISSNNLAQLQAAYDEALVAMRKSGYQANMSKTQAPSSKISVFNLTLSKGVMKVTSQKMSDFLIDFYSSNYEPHRIGVKNYVEAVNPGQAKLFKLSGGSKRTADGSEFEPKKKRKV

SEQ ID NO: 1287 - protein, 1696 aa, synthetic construct
MKRTADGSEFESPKKKRKVDKKYSIGLDIGTNSVGWAVITDEYKVPSKKFKVLGNTDRHSIKKNLIGALLFDSGETAEATRLKRTARRRYTRRKNRICYLQEIFSNEMAKVDDSFFHRLEESFLVEEDKKHERHPIFGNIVDEVAYHEKYPTIYHLRKKLVDSTDKADLRLIYLALAHMIKFRGHFLIEGDLNPDNSDVDKLFIQLVQTYNQLFEENPINASGVDAKAILSARLSKSRRLENLIAQLPGEKKNGLFGNLIALSLGLTPNFKSNFDLAEDAKLQLSKDTYDDDLDNLLAQIGDQYADLFLAAKNLSDAILLSDILRVNTEITKAPLSASMIKRYDEHHQDLTLLKALVRQQLPEKYKEIFFDQSKNGYAGYIDGGASQEEFYKFIKPILEKMDGTEELLVKLNREDLLRKQRTFDNGSIPHQIHLGELHAILRRQEDFYPFLKDNREKIEKILTFRIPYYVGPLARGNSRFAWMTRKSEETITPWNFEEVVDKGASAQSFIERMTNFDKNLPNEKVLPKHSLLYEYFTVYNELTKVKYVTEGMRKPAFLSGEQKKAIVDLLFKTNRKVTVKQLKEDYFKKIECFDSVEISGVEDRFNASLGTYHDLLKIIKDKDFLDNEENEDILEDIVLTLTLFEDREMIEERLKTYAHLFDDKVMKQLKRRRYTGWGRLSRKLINGIRDKQSGKTILDFLKSDGFANRNFMQLIHDDSLTFKEDIQKAQVSGQGDSLHEHIANLAGSPAIKKGILQTVKVVDELVKVMGRHKPENIVIEMARENQTTQKGQKNSRERMKRIEEGIKELGSQILKEHPVENTQLQNEKLYLYYLQNGRDMYVDQELDINRLSDYDVDAIVPQSFLKDDSIDNKVLTRSDKNRGKSDNVPSEEVVKKMKNYWRQLLNAKLITQRKFDNLTKAERGGLSELDKAGFIKRQLVETRQITKHVAQILDSRMNTKYDENDKLIREVKVITLKSKLVSDFRKDFQFYKVREINNYHHAHDAYLNAVVGTALIKKYPKLESEFVYGDYKVYDVRKMIAKSEQEIGKATAKYFFYSNIMNFFKTEITLANGEIRKRPLIETNGETGEIVWDKGRDFATVRKVLSMPQVNIVKKTEVQTGGFSKESILPKRNSDKLIARKKDWDPKKYGGFDSPTVAYSVLVVAKVEKGKSKKLKSVKELLGITIMERSSFEKNPIDFLEAKGYKEVKKDLIIKLPKYSLFELENGRKRMLASAGELQKGNELALPSKYVNFLYLASHYEKLKGSPEDNEQKQLFVEQHKHYLDEIIEQISEFSKRVILADANLDKVLSAYNKHRDKPIREQAENIIHLFTLTNLGAPAAFKYFDTTIDRKRYTSTKEVLDATLIHQSITGLYETRIDLSQLGGDSGGSSGGSSGSETPGTSESATPESSGGSSGGSSTIEVQRWEDKFEIKPGVWVYVPSVEARKVGGKILQAVRNKWIPPLYFYHLRTGGHLKAARLHLKSDFFAVVDIIQFFQSTSRSRITRDLKSYFTASQAREISTFSTVRNLSHSPHKHVLPFGFVQSPILATLCLDKSYFGSLLRRLNKHHDLKLSVFMDDVIISSNRLAYLQAAYDEALVAMRKSGYQANMSKTQAPSSKISVFNLTLSKGVMKVTSQKMSDFLIDFYSSNYEPHRIGVKNYVEAVNPGQAKLFKLSGGSKRTADGSEFEPKKKRKV

SEQ ID NO: 1288 - protein, 1696 aa, synthetic construct
MKRTADGSEFESPKKKRKVDKKYSIGLDIGTNSVGWAVITDEYKVPSKKFKVLGNTDRHSIKKNLIGALLFDSGETAEATRLKRTARRRYTRRKNRICYLQEIFSNEMAKVDDSFFHRLEESFLVEEDKKHERHPIFGNIVDEVAYHEKYPTIYHLRKKLVDSTDKADLRLIYLALAHMIKFRGHFLIEGDLNPDNSDVDKLFIQLVQTYNQLFEENPINASGVDAKAILSARLSKSRRLENLIAQLPGEKKNGLFGNLIALSLGLTPNFKSNFDLAEDAKLQLSKDTYDDDLDNLLAQIGDQYADLFLAAKNLSDAILLSDILRVNTEITKAPLSASMIKRYDEHHQDLTLLKALVRQQLPEKYKEIFFDQSKNGYAGYIDGGASQEEFYKFIKPILEKMDGTEELLVKLNREDLLRKQRTFDNGSIPHQIHLGELHAILRRQEDFYPFLKDNREKIEKILTFRIPYYVGPLARGNSRFAWMTRKSEETITPWNFEEVVDKGASAQSFIERMTNFDKNLPNEKVLPKHSLLYEYFTVYNELTKVKYVTEGMRKPAFLSGEQKKAIVDLLFKTNRKVTVKQLKEDYFKKIECFDSVEISGVEDRFNASLGTYHDLLKIIKDKDFLDNEENEDILEDIVLTLTLFEDREMIEERLKTYAHLFDDKVMKQLKRRRYTGWGRLSRKLINGIRDKQSGKTILDFLKSDGFANRNFMQLIHDDSLTFKEDIQKAQVSGQGDSLHEHIANLAGSPAIKKGILQTVKVVDELVKVMGRHKPENIVIEMARENQTTQKGQKNSRERMKRIEEGIKELGSQILKEHPVENTQLQNEKLYLYYLQNGRDMYVDQELDINRLSDYDVDAIVPQSFLKDDSIDNKVLTRSDKNRGKSDNVPSEEVVKKMKNYWRQLLNAKLITQRKFDNLTKAERGGLSELDKAGFIKRQLVETRQITKHVAQILDSRMNTKYDENDKLIREVKVITLKSKLVSDFRKDFQFYKVREINNYHHAHDAYLNAVVGTALIKKYPKLESEFVYGDYKVYDVRKMIAKSEQEIGKATAKYFFYSNIMNFFKTEITLANGEIRKRPLIETNGETGEIVWDKGRDFATVRKVLSMPQVNIVKKTEVQTGGFSKESILPKRNSDKLIARKKDWDPKKYGGFDSPTVAYSVLVVAKVEKGKSKKLKSVKELLGITIMERSSFEKNPIDFLEAKGYKEVKKDLIIKLPKYSLFELENGRKRMLASAGELQKGNELALPSKYVNFLYLASHYEKLKGSPEDNEQKQLFVEQHKHYLDEIIEQISEFSKRVILADANLDKVLSAYNKHRDKPIREQAENIIHLFTLTNLGAPAAFKYFDTTIDRKRYTSTKEVLDATLIHQSITGLYETRIDLSQLGGDSGGSSGGSSGSETPGTSESATPESSGGSSGGSSTIEVQRWEDKFEIKPGVWVYVPSVEARKVGGKILQAVRNKWIPPLYFYHLRTGGHLKAARLHLKSDFFAVVDIKQFFQSTYRSRITRDLKSYFTYSCAVEISTFSTVRNLSHSPHCHVLPFGFVQSPILATLCLDKSYFGSLLRRLNKHHDLKLSVFMDDVIISSNNLAQLQAAYDEALVAMRKSGYQANMSKTQAPSSKISVFNLTLSKGVMKVTSQKMSDFLIDFYSSNYEPHRIGVKNYVEAVNPGQAKLFKLSGGSKRTADGSEFEPKKKRKV

SEQ ID NO: 1289 - protein, 1696 aa, synthetic construct
MKRTADGSEFESPKKKRKVDKKYSIGLDIGTNSVGWAVITDEYKVPSKKFKVLGNTDRHSIKKNLIGALLFDSGETAEATRLKRTARRRYTRRKNRICYLQEIFSNEMAKVDDSFFHRLEESFLVEEDKKHERHPIFGNIVDEVAYHEKYPTIYHLRKKLVDSTDKADLRLIYLALAHMIKFRGHFLIEGDLNPDNSDVDKLFIQLVQTYNQLFEENPINASGVDAKAILSARLSKSRRLENLIAQLPGEKKNGLFGNLIALSLGLTPNFKSNFDLAEDAKLQLSKDTYDDDLDNLLAQIGDQYADLFLAAKNLSDAILLSDILRVNTEITKAPLSASMIKRYDEHHQDLTLLKALVRQQLPEKYKEIFFDQSKNGYAGYIDGGASQEEFYKFIKPILEKMDGTEELLVKLNREDLLRKQRTFDNGSIPHQIHLGELHAILRRQEDFYPFLKDNREKIEKILTFRIPYYVGPLARGNSRFAWMTRKSEETITPWNFEEVVDKGASAQSFIERMTNFDKNLPNEKVLPKHSLLYEYFTVYNELTKVKYVTEGMRKPAFLSGEQKKAIVDLLFKTNRKVTVKQLKEDYFKKIECFDSVEISGVEDRFNASLGTYHDLLKIIKDKDFLDNEENEDILEDIVLTLTLFEDREMIEERLKTYAHLFDDKVMKQLKRRRYTGWGRLSRKLINGIRDKQSGKTILDFLKSDGFANRNFMQLIHDDSLTFKEDIQKAQVSGQGDSLHEHIANLAGSPAIKKGILQTVKVVDELVKVMGRHKPENIVIEMARENQTTQKGQKNSRERMKRIEEGIKELGSQILKEHPVENTQLQNEKLYLYYLQNGRDMYVDQELDINRLSDYDVDAIVPQSFLKDDSIDNKVLTRSDKNRGKSDNVPSEEVVKKMKNYWRQLLNAKLITQRKFDNLTKAERGGLSELDKAGFIKRQLVETRQITKHVAQILDSRMNTKYDENDKLIREVKVITLKSKLVSDFRKDFQFYKVREINNYHHAHDAYLNAVVGTALIKKYPKLESEFVYGDYKVYDVRKMIAKSEQEIGKATAKYFFYSNIMNFFKTEITLANGEIRKRPLIETNGETGEIVWDKGRDFATVRKVLSMPQVNIVKKTEVQTGGFSKESILPKRNSDKLIARKKDWDPKKYGGFDSPTVAYSVLVVAKVEKGKSKKLKSVKELLGITIMERSSFEKNPIDFLEAKGYKEVKKDLIIKLPKYSLFELENGRKRMLASAGELQKGNELALPSKYVNFLYLASHYEKLKGSPEDNEQKQLFVEQHKHYLDEIIEQISEFSKRVILADANLDKVLSAYNKHRDKPIREQAENIIHLFTLTNLGAPAAFKYFDTTIDRKRYTSTKEVLDATLIHQSITGLYETRIDLSQLGGDSGGSSGGSSGSETPGTSESATPESSGGSSGGSSTIEVQRWEDKFEIKPGVWVTVPSVEARKVGGKILQAVRNKWIPPLYFYHLRTGGHLKAARLHLKSDFFAVVDIKQFFQSTSRSRITRDLKSYFTYSQAREISTFSTVRNLSHSIHKHVLPFGFVQSPILATLCLDKSYFGSLLRRLNKNHDLKLSVFMDDVIISSNNLAQLQAAYDEALVAMRKSGYQANMSKTQAPSSKINVFNLTLSKGVMKVTSQKMSDFLIDFYSSNYEPHRIGVKNYVEAVNPGQAKLFKLSGGSKRTADGSEFEPKKKRKV

SEQ ID NO: 1290 - protein, 1696 aa, synthetic construct
MKRTADGSEFESPKKKRKVDKKYSIGLDIGTNSVGWAVITDEYKVPSKKFKVLGNTDRHSIKKNLIGALLFDSGETAEATRLKRTARRRYTRRKNRICYLQEIFSNEMAKVDDSFFHRLEESFLVEEDKKHERHPIFGNIVDEVAYHEKYPTIYHLRKKLVDSTDKADLRLIYLALAHMIKFRGHFLIEGDLNPDNSDVDKLFIQLVQTYNQLFEENPINASGVDAKAILSARLSKSRRLENLIAQLPGEKKNGLFGNLIALSLGLTPNFKSNFDLAEDAKLQLSKDTYDDDLDNLLAQIGDQYADLFLAAKNLSDAILLSDILRVNTEITKAPLSASMIKRYDEHHQDLTLLKALVRQQLPEKYKEIFFDQSKNGYAGYIDGGASQEEFYKFIKPILEKMDGTEELLVKLNREDLLRKQRTFDNGSIPHQIHLGELHAILRRQEDFYPFLKDNREKIEKILTFRIPYYVGPLARGNSRFAWMTRKSEETITPWNFEEVVDKGASAQSFIERMTNFDKNLPNEKVLPKHSLLYEYFTVYNELTKVKYVTEGMRKPAFLSGEQKKAIVDLLFKTNRKVTVKQLKEDYFKKIECFDSVEISGVEDRFNASLGTYHDLLKIIKDKDFLDNEENEDILEDIVLTLTLFEDREMIEERLKTYAHLFDDKVMKQLKRRRYTGWGRLSRKLINGIRDKQSGKTILDFLKSDGFANRNFMQLIHDDSLTFKEDIQKAQVSGQGDSLHEHIANLAGSPAIKKGILQTVKVVDELVKVMGRHKPENIVIEMARENQTTQKGQKNSRERMKRIEEGIKELGSQILKEHPVENTQLQNEKLYLYYLQNGRDMYVDQELDINRLSDYDVDAIVPQSFLKDDSIDNKVLTRSDKNRGKSDNVPSEEVVKKMKNYWRQLLNAKLITQRKFDNLTKAERGGLSELDKAGFIKRQLVETRQITKHVAQILDSRMNTKYDENDKLIREVKVITLKSKLVSDFRKDFQFYKVREINNYHHAHDAYLNAVVGTALIKKYPKLESEFVYGDYKVYDVRKMIAKSEQEIGKATAKYFFYSNIMNFFKTEITLANGEIRKRPLIETNGETGEIVWDKGRDFATVRKVLSMPQVNIVKKTEVQTGGFSKESILPKRNSDKLIARKKDWDPKKYGGFDSPTVAYSVLVVAKVEKGKSKKLKSVKELLGITIMERSSFEKNPIDFLEAKGYKEVKKDLIIKLPKYSLFELENGRKRMLASAGELQKGNELALPSKYVNFLYLASHYEKLKGSPEDNEQKQLFVEQHKHYLDEIIEQISEFSKRVILADANLDKVLSAYNKHRDKPIREQAENIIHLFTLTNLGAPAAFKYFDTTIDRKRYTSTKEVLDATLIHQSITGLYETRIDLSQLGGDSGGSSGGSSGSETPGTSESATPESSGGSSGGSSTIEVQRWEDKFEIKPGVWVYVPSVEARKVGGKILQAVRNKWIPPLYFYHLRTGGHLKAARLHLKSDFFAVVDIKQFFQSTSDSRITRDLKSYFTYSQAREISTFSTVRNLSHSPHKHVLPFGFVQSPILATLCLDKSYFGSLLRRLNKHHDLKLSVFMDDVIISSNNLAQLQAAYDEALVAMRKSGYQANMSKTQAPSSKISVFNLTLSKGVMKVTSQKMSDFLIDFYSSNYEPHRIGVKNYVEAVNPGQAKLFKLSGGSKRTADGSEFEPKKKRKV

SEQ ID NO: 1291 - protein, 1696 aa, synthetic construct
MKRTADGSEFESPKKKRKVDKKYSIGLDIGTNSVGWAVITDEYKVPSKKFKVLGNTDRHSIKKNLIGALLFDSGETAEATRLKRTARRRYTRRKNRICYLQEIFSNEMAKVDDSFFHRLEESFLVEEDKKHERHPIFGNIVDEVAYHEKYPTIYHLRKKLVDSTDKADLRLIYLALAHMIKFRGHFLIEGDLNPDNSDVDKLFIQLVQTYNQLFEENPINASGVDAKAILSARLSKSRRLENLIAQLPGEKKNGLFGNLIALSLGLTPNFKSNFDLAEDAKLQLSKDTYDDDLDNLLAQIGDQYADLFLAAKNLSDAILLSDILRVNTEITKAPLSASMIKRYDEHHQDLTLLKALVRQQLPEKYKEIFFDQSKNGYAGYIDGGASQEEFYKFIKPILEKMDGTEELLVKLNREDLLRKQRTFDNGSIPHQIHLGELHAILRRQEDFYPFLKDNREKIEKILTFRIPYYVGPLARGNSRFAWMTRKSEETITPWNFEEVVDKGASAQSFIERMTNFDKNLPNEKVLPKHSLLYEYFTVYNELTKVKYVTEGMRKPAFLSGEQKKAIVDLLFKTNRKVTVKQLKEDYFKKIECFDSVEISGVEDRFNASLGTYHDLLKIIKDKDFLDNEENEDILEDIVLTLTLFEDREMIEERLKTYAHLFDDKVMKQLKRRRYTGWGRLSRKLINGIRDKQSGKTILDFLKSDGFANRNFMQLIHDDSLTFKEDIQKAQVSGQGDSLHEHIANLAGSPAIKKGILQTVKVVDELVKVMGRHKPENIVIEMARENQTTQKGQKNSRERMKRIEEGIKELGSQILKEHPVENTQLQNEKLYLYYLQNGRDMYVDQELDINRLSDYDVDAIVPQSFLKDDSIDNKVLTRSDKNRGKSDNVPSEEVVKKMKNYWRQLLNAKLITQRKFDNLTKAERGGLSELDKAGFIKRQLVETRQITKHVAQILDSRMNTKYDENDKLIREVKVITLKSKLVSDFRKDFQFYKVREINNYHHAHDAYLNAVVGTALIKKYPKLESEFVYGDYKVYDVRKMIAKSEQEIGKATAKYFFYSNIMNFFKTEITLANGEIRKRPLIETNGETGEIVWDKGRDFATVRKVLSMPQVNIVKKTEVQTGGFSKESILPKRNSDKLIARKKDWDPKKYGGFDSPTVAYSVLVVAKVEKGKSKKLKSVKELLGITIMERSSFEKNPIDFLEAKGYKEVKKDLIIKLPKYSLFELENGRKRMLASAGELQKGNELALPSKYVNFLYLASHYEKLKGSPEDNEQKQLFVEQHKHYLDEIIEQISEFSKRVILADANLDKVLSAYNKHRDKPIREQAENIIHLFTLTNLGAPAAFKYFDTTIDRKRYTSTKEVLDATLIHQSITGLYETRIDLSQLGGDSGGSSGGSSGSETPGTSESATPESSGGSSGGSSTIEVQRWEDKFEIKPGVWVYVPSVEARKVGGKILQAVRNKWIPPLYFYHLRTGGHLKAARLHLKSDYFAVVDIKQFFQSTSRSRITRDLKSYFTYSQAREISTFSTVRNLSHSPHKHVLPFGFVQSPILATLCLDKSYFGSLLRRLNKHHDLKLSVFMDDVIISSNNLAQLQAAYDEALVAMRKSGYQANMSKTQAPSSKISVFNLTLSKGVMKVTSQKMSDFLIDFYSSNYEPHRIGVKNYVEAVNPGQAKLFKLSGGSKRTADGSEFEPKKKRKV

SEQ ID NO: 1292 - protein, 1696 aa, synthetic construct
MKRTADGSEFESPKKKRKVDKKYSIGLDIGTNSVGWAVITDEYKVPSKKFKVLGNTDRHSIKKNLIGALLFDSGETAEATRLKRTARRRYTRRKNRICYLQEIFSNEMAKVDDSFFHRLEESFLVEEDKKHERHPIFGNIVDEVAYHEKYPTIYHLRKKLVDSTDKADLRLIYLALAHMIKFRGHFLIEGDLNPDNSDVDKLFIQLVQTYNQLFEENPINASGVDAKAILSARLSKSRRLENLIAQLPGEKKNGLFGNLIALSLGLTPNFKSNFDLAEDAKLQLSKDTYDDDLDNLLAQIGDQYADLFLAAKNLSDAILLSDILRVNTEITKAPLSASMIKRYDEHHQDLTLLKALVRQQLPEKYKEIFFDQSKNGYAGYIDGGASQEEFYKFIKPILEKMDGTEELLVKLNREDLLRKQRTFDNGSIPHQIHLGELHAILRRQEDFYPFLKDNREKIEKILTFRIPYYVGPLARGNSRFAWMTRKSEETITPWNFEEVVDKGASAQSFIERMTNFDKNLPNEKVLPKHSLLYEYFTVYNELTKVKYVTEGMRKPAFLSGEQKKAIVDLLFKTNRKVTVKQLKEDYFKKIECFDSVEISGVEDRFNASLGTYHDLLKIIKDKDFLDNEENEDILEDIVLTLTLFEDREMIEERLKTYAHLFDDKVMKQLKRRRYTGWGRLSRKLINGIRDKQSGKTILDFLKSDGFANRNFMQLIHDDSLTFKEDIQKAQVSGQGDSLHEHIANLAGSPAIKKGILQTVKVVDELVKVMGRHKPENIVIEMARENQTTQKGQKNSRERMKRIEEGIKELGSQILKEHPVENTQLQNEKLYLYYLQNGRDMYVDQELDINRLSDYDVDAIVPQSFLKDDSIDNKVLTRSDKNRGKSDNVPSEEVVKKMKNYWRQLLNAKLITQRKFDNLTKAERGGLSELDKAGFIKRQLVETRQITKHVAQILDSRMNTKYDENDKLIREVKVITLKSKLVSDFRKDFQFYKVREINNYHHAHDAYLNAVVGTALIKKYPKLESEFVYGDYKVYDVRKMIAKSEQEIGKATAKYFFYSNIMNFFKTEITLANGEIRKRPLIETNGETGEIVWDKGRDFATVRKVLSMPQVNIVKKTEVQTGGFSKESILPKRNSDKLIARKKDWDPKKYGGFDSPTVAYSVLVVAKVEKGKSKKLKSVKELLGITIMERSSFEKNPIDFLEAKGYKEVKKDLIIKLPKYSLFELENGRKRMLASAGELQKGNELALPSKYVNFLYLASHYEKLKGSPEDNEQKQLFVEQHKHYLDEIIEQISEFSKRVILADANLDKVLSAYNKHRDKPIREQAENIIHLFTLTNLGAPAAFKYFDTTIDRKRYTSTKEVLDATLIHQSITGLYETRIDLSQLGGDSGGSSGGSSGSETPGTSESATPESSGGSSGGSSTIEVQRHVDKFEIKPGVWVYVPSVEARKVGGKILQAVRNKWIPPLYFYHLRTGGHLKAARLHLKSDFFAVVDIKQFFQSTSRSRITRDLKSYFTYSQAREISTFSTVRNLSHSPHKHVLPFGFVQSPILATLCLDKSYFGSLLFRLNCHHDLKLSVFMDDVIISSNNLAQLQAAYDEALVAMRKSGYQANMSKTQAPSSKISVFNLTLSKGVMKVTSQKMSDFLIDFISSNYEPHRIGVKNYVEAVNPGQAKLFKLSGGSKRTADGSEFEPKKKRKV

SEQ ID NO: 1293 - protein, 1696 aa, synthetic construct
MKRTADGSEFESPKKKRKVDKKYSIGLDIGTNSVGWAVITDEYKVPSKKFKVLGNTDRHSIKKNLIGALLFDSGETAEATRLKRTARRRYTRRKNRICYLQEIFSNEMAKVDDSFFHRLEESFLVEEDKKHERHPIFGNIVDEVAYHEKYPTIYHLRKKLVDSTDKADLRLIYLALAHMIKFRGHFLIEGDLNPDNSDVDKLFIQLVQTYNQLFEENPINASGVDAKAILSARLSKSRRLENLIAQLPGEKKNGLFGNLIALSLGLTPNFKSNFDLAEDAKLQLSKDTYDDDLDNLLAQIGDQYADLFLAAKNLSDAILLSDILRVNTEITKAPLSASMIKRYDEHHQDLTLLKALVRQQLPEKYKEIFFDQSKNGYAGYIDGGASQEEFYKFIKPILEKMDGTEELLVKLNREDLLRKQRTFDNGSIPHQIHLGELHAILRRQEDFYPFLKDNREKIEKILTFRIPYYVGPLARGNSRFAWMTRKSEETITPWNFEEVVDKGASAQSFIERMTNFDKNLPNEKVLPKHSLLYEYFTVYNELTKVKYVTEGMRKPAFLSGEQKKAIVDLLFKTNRKVTVKQLKEDYFKKIECFDSVEISGVEDRFNASLGTYHDLLKIIKDKDFLDNEENEDILEDIVLTLTLFEDREMIEERLKTYAHLFDDKVMKQLKRRRYTGWGRLSRKLINGIRDKQSGKTILDFLKSDGFANRNFMQLIHDDSLTFKEDIQKAQVSGQGDSLHEHIANLAGSPAIKKGILQTVKVVDELVKVMGRHKPENIVIEMARENQTTQKGQKNSRERMKRIEEGIKELGSQILKEHPVENTQLQNEKLYLYYLQNGRDMYVDQELDINRLSDYDVDAIVPQSFLKDDSIDNKVLTRSDKNRGKSDNVPSEEVVKKMKNYWRQLLNAKLITQRKFDNLTKAERGGLSELDKAGFIKRQLVETRQITKHVAQILDSRMNTKYDENDKLIREVKVITLKSKLVSDFRKDFQFYKVREINNYHHAHDAYLNAVVGTALIKKYPKLESEFVYGDYKVYDVRKMIAKSEQEIGKATAKYFFYSNIMNFFKTEITLANGEIRKRPLIETNGETGEIVWDKGRDFATVRKVLSMPQVNIVKKTEVQTGGFSKESILPKRNSDKLIARKKDWDPKKYGGFDSPTVAYSVLVVAKVEKGKSKKLKSVKELLGITIMERSSFEKNPIDFLEAKGYKEVKKDLIIKLPKYSLFELENGRKRMLASAGELQKGNELALPSKYVNFLYLASHYEKLKGSPEDNEQKQLFVEQHKHYLDEIIEQISEFSKRVILADANLDKVLSAYNKHRDKPIREQAENIIHLFTLTNLGAPAAFKYFDTTIDRKRYTSTKEVLDATLIHQSITGLYETRIDLSQLGGDSGGSSGGSSGSETPGTSESATPESSGGSSGGSSTIEVQRWEDKFEIKPGVWVYVPSVEARKVGGKILQVVRNKWIPPLYFYHLRTGGHLKAARLHLKSDFFAVVDIKQFFQSTSRDRITRDLKSYFTYSQAREISTFSTVHNLSHSPHKHVLPFGFVQSPILATLCLDKSYFGSLLRRLNKHHDLKLSVFMDDVIISSNNLNQLQAAYDEALVAMRKSGYQANMSKTQAPSSKISVFNLTLSKGVMKVTSQKMSDFLIDFYSSNYEPHRIGVKNYVEAVNPGQAKLFKLSGGSKRTADGSEFEPKKKRKV

SEQ ID NO: 1294 - protein, 1696 aa, synthetic construct
MKRTADGSEFESPKKKRKVDKKYSIGLDIGTNSVGWAVITDEYKVPSKKFKVLGNTDRHSIKKNLIGALLFDSGETAEATRLKRTARRRYTRRKNRICYLQEIFSNEMAKVDDSFFHRLEESFLVEEDKKHERHPIFGNIVDEVAYHEKYPTIYHLRKKLVDSTDKADLRLIYLALAHMIKFRGHFLIEGDLNPDNSDVDKLFIQLVQTYNQLFEENPINASGVDAKAILSARLSKSRRLENLIAQLPGEKKNGLFGNLIALSLGLTPNFKSNFDLAEDAKLQLSKDTYDDDLDNLLAQIGDQYADLFLAAKNLSDAILLSDILRVNTEITKAPLSASMIKRYDEHHQDLTLLKALVRQQLPEKYKEIFFDQSKNGYAGYIDGGASQEEFYKFIKPILEKMDGTEELLVKLNREDLLRKQRTFDNGSIPHQIHLGELHAILRRQEDFYPFLKDNREKIEKILTFRIPYYVGPLARGNSRFAWMTRKSEETITPWNFEEVVDKGASAQSFIERMTNFDKNLPNEKVLPKHSLLYEYFTVYNELTKVKYVTEGMRKPAFLSGEQKKAIVDLLFKTNRKVTVKQLKEDYFKKIECFDSVEISGVEDRFNASLGTYHDLLKIIKDKDFLDNEENEDILEDIVLTLTLFEDREMIEERLKTYAHLFDDKVMKQLKRRRYTGWGRLSRKLINGIRDKQSGKTILDFLKSDGFANRNFMQLIHDDSLTFKEDIQKAQVSGQGDSLHEHIANLAGSPAIKKGILQTVKVVDELVKVMGRHKPENIVIEMARENQTTQKGQKNSRERMKRIEEGIKELGSQILKEHPVENTQLQNEKLYLYYLQNGRDMYVDQELDINRLSDYDVDAIVPQSFLKDDSIDNKVLTRSDKNRGKSDNVPSEEVVKKMKNYWRQLLNAKLITQRKFDNLTKAERGGLSELDKAGFIKRQLVETRQITKHVAQILDSRMNTKYDENDKLIREVKVITLKSKLVSDFRKDFQFYKVREINNYHHAHDAYLNAVVGTALIKKYPKLESEFVYGDYKVYDVRKMIAKSEQEIGKATAKYFFYSNIMNFFKTEITLANGEIRKRPLIETNGETGEIVWDKGRDFATVRKVLSMPQVNIVKKTEVQTGGFSKESILPKRNSDKLIARKKDWDPKKYGGFDSPTVAYSVLVVAKVEKGKSKKLKSVKELLGITIMERSSFEKNPIDFLEAKGYKEVKKDLIIKLPKYSLFELENGRKRMLASAGELQKGNELALPSKYVNFLYLASHYEKLKGSPEDNEQKQLFVEQHKHYLDEIIEQISEFSKRVILADANLDKVLSAYNKHRDKPIREQAENIIHLFTLTNLGAPAAFKYFDTTIDRKRYTSTKEVLDATLIHQSITGLYETRIDLSQLGGDSGGSSGGSSGSETPGTSESATPESSGGSSGGSSTIEVQRWEDKFEIKPGVWVYVPSVEARKVGGKILQAVRNKWIPPLYFYHLRTGGHLQAARLHLKSDFFAVVDIKQFFQSTSRSRITRDLKSYFTYSQAREISTQSTVRNLSHSPHKHVLPFGFVQSPILATLCLDKSYFGSMLRRLNKHHDLKLSVFMDDVIISSNNLAQLQAAYDEALVAMRKSGYQANMSKTQAPSSKISVFNLTLSKGVMKVTSQKMSDFLIDFYSENYEPHRIGVKNYVEAVNPGQAKLFKLSGGSKRTADGSEFEPKKKRKV

SEQ ID NO: 1295 - protein, 1696 aa, synthetic construct
MKRTADGSEFESPKKKRKVDKKYSIGLDIGTNSVGWAVITDEYKVPSKKFKVLGNTDRHSIKKNLIGALLFDSGETAEATRLKRTARRRYTRRKNRICYLQEIFSNEMAKVDDSFFHRLEESFLVEEDKKHERHPIFGNIVDEVAYHEKYPTIYHLRKKLVDSTDKADLRLIYLALAHMIKFRGHFLIEGDLNPDNSDVDKLFIQLVQTYNQLFEENPINASGVDAKAILSARLSKSRRLENLIAQLPGEKKNGLFGNLIALSLGLTPNFKSNFDLAEDAKLQLSKDTYDDDLDNLLAQIGDQYADLFLAAKNLSDAILLSDILRVNTEITKAPLSASMIKRYDEHHQDLTLLKALVRQQLPEKYKEIFFDQSKNGYAGYIDGGASQEEFYKFIKPILEKMDGTEELLVKLNREDLLRKQRTFDNGSIPHQIHLGELHAILRRQEDFYPFLKDNREKIEKILTFRIPYYVGPLARGNSRFAWMTRKSEETITPWNFEEVVDKGASAQSFIERMTNFDKNLPNEKVLPKHSLLYEYFTVYNELTKVKYVTEGMRKPAFLSGEQKKAIVDLLFKTNRKVTVKQLKEDYFKKIECFDSVEISGVEDRFNASLGTYHDLLKIIKDKDFLDNEENEDILEDIVLTLTLFEDREMIEERLKTYAHLFDDKVMKQLKRRRYTGWGRLSRKLINGIRDKQSGKTILDFLKSDGFANRNFMQLIHDDSLTFKEDIQKAQVSGQGDSLHEHIANLAGSPAIKKGILQTVKVVDELVKVMGRHKPENIVIEMARENQTTQKGQKNSRERMKRIEEGIKELGSQILKEHPVENTQLQNEKLYLYYLQNGRDMYVDQELDINRLSDYDVDAIVPQSFLKDDSIDNKVLTRSDKNRGKSDNVPSEEVVKKMKNYWRQLLNAKLITQRKFDNLTKAERGGLSELDKAGFIKRQLVETRQITKHVAQILDSRMNTKYDENDKLIREVKVITLKSKLVSDFRKDFQFYKVREINNYHHAHDAYLNAVVGTALIKKYPKLESEFVYGDYKVYDVRKMIAKSEQEIGKATAKYFFYSNIMNFFKTEITLANGEIRKRPLIETNGETGEIVWDKGRDFATVRKVLSMPQVNIVKKTEVQTGGFSKESILPKRNSDKLIARKKDWDPKKYGGFDSPTVAYSVLVVAKVEKGKSKKLKSVKELLGITIMERSSFEKNPIDFLEAKGYKEVKKDLIIKLPKYSLFELENGRKRMLASAGELQKGNELALPSKYVNFLYLASHYEKLKGSPEDNEQKQLFVEQHKHYLDEIIEQISEFSKRVILADANLDKVLSAYNKHRDKPIREQAENIIHLFTLTNLGAPAAFKYFDTTIDRKRYTSTKEVLDATLIHQSITGLYETRIDLSQLGGDSGGSSGGSSGSETPGTSESATPESSGGSSGGSSTIEVQRWEDKFEIKPGVWVYVPSVEARKVGGKILQAVRNKWIPPLYFYHLRTGGHLKAARLHLKSDFFAVVDIKQFFQSTSRSRITRDLKSYFTYSQAREISTFSTVRNLSHSPHKHVLPFGFVQSPILATLCLDKSYFGSLLRRLNKHHDLKLSVFMDDVIISSNNLAQLQAAYDEALVAMRKSGYQANMSKTQAPSSKISVFNLYLSKGVMKVTSQKMSDFLIDFYSSNYEPHRIGVKNYVEAVNPGQAKLFKLSGGSKRTADGSEFEPKKKRKV

SEQ ID NO: 1296 - protein, 1696 aa, synthetic construct
MKRTADGSEFESPKKKRKVDKKYSIGLDIGTNSVGWAVITDEYKVPSKKFKVLGNTDRHSIKKNLIGALLFDSGETAEATRLKRTARRRYTRRKNRICYLQEIFSNEMAKVDDSFFHRLEESFLVEEDKKHERHPIFGNIVDEVAYHEKYPTIYHLRKKLVDSTDKADLRLIYLALAHMIKFRGHFLIEGDLNPDNSDVDKLFIQLVQTYNQLFEENPINASGVDAKAILSARLSKSRRLENLIAQLPGEKKNGLFGNLIALSLGLTPNFKSNFDLAEDAKLQLSKDTYDDDLDNLLAQIGDQYADLFLAAKNLSDAILLSDILRVNTEITKAPLSASMIKRYDEHHQDLTLLKALVRQQLPEKYKEIFFDQSKNGYAGYIDGGASQEEFYKFIKPILEKMDGTEELLVKLNREDLLRKQRTFDNGSIPHQIHLGELHAILRRQEDFYPFLKDNREKIEKILTFRIPYYVGPLARGNSRFAWMTRKSEETITPWNFEEVVDKGASAQSFIERMTNFDKNLPNEKVLPKHSLLYEYFTVYNELTKVKYVTEGMRKPAFLSGEQKKAIVDLLFKTNRKVTVKQLKEDYFKKIECFDSVEISGVEDRFNASLGTYHDLLKIIKDKDFLDNEENEDILEDIVLTLTLFEDREMIEERLKTYAHLFDDKVMKQLKRRRYTGWGRLSRKLINGIRDKQSGKTILDFLKSDGFANRNFMQLIHDDSLTFKEDIQKAQVSGQGDSLHEHIANLAGSPAIKKGILQTVKVVDELVKVMGRHKPENIVIEMARENQTTQKGQKNSRERMKRIEEGIKELGSQILKEHPVENTQLQNEKLYLYYLQNGRDMYVDQELDINRLSDYDVDAIVPQSFLKDDSIDNKVLTRSDKNRGKSDNVPSEEVVKKMKNYWRQLLNAKLITQRKFDNLTKAERGGLSELDKAGFIKRQLVETRQITKHVAQILDSRMNTKYDENDKLIREVKVITLKSKLVSDFRKDFQFYKVREINNYHHAHDAYLNAVVGTALIKKYPKLESEFVYGDYKVYDVRKMIAKSEQEIGKATAKYFFYSNIMNFFKTEITLANGEIRKRPLIETNGETGEIVWDKGRDFATVRKVLSMPQVNIVKKTEVQTGGFSKESILPKRNSDKLIARKKDWDPKKYGGFDSPTVAYSVLVVAKVEKGKSKKLKSVKELLGITIMERSSFEKNPIDFLEAKGYKEVKKDLIIKLPKYSLFELENGRKRMLASAGELQKGNELALPSKYVNFLYLASHYEKLKGSPEDNEQKQLFVEQHKHYLDEIIEQISEFSKRVILADANLDKVLSAYNKHRDKPIREQAENIIHLFTLTNLGAPAAFKYFDTTIDRKRYTSTKEVLDATLIHQSITGLYETRIDLSQLGGDSGGSSGGSSGSETPGTSESATPESSGGSSGGSSTIEVQRWEDKFEIKPGVWVYVPSVEARKVGGKILQAVRNKWIPPLYFYHLRTGGHLKAARLHLKSDFFAVVDIKQFFQSTSRSRITRDLKSYFTYSQAREISTFSTVRNLWHSPHKHVLPFGFVQSPILATLCLDKSYFGSLLRRLNKHHDLKLSVFMDDVIISSNNLAQLQAAYDEALVAMRKSGYQANMSKTQAPSSKISVFNLTLSKGVMKVTSQKMSDFLIDFYSSNYEPHRIGVKNYVEAVNPGQAKLFKLSGGSKRTADGSEFEPKKKRKV

SEQ ID NO: 1297 - protein, 1696 aa, synthetic construct
MKRTADGSEFESPKKKRKVDKKYSIGLDIGTNSVGWAVITDEYKVPSKKFKVLGNTDRHSIKKNLIGALLFDSGETAEATRLKRTARRRYTRRKNRICYLQEIFSNEMAKVDDSFFHRLEESFLVEEDKKHERHPIFGNIVDEVAYHEKYPTIYHLRKKLVDSTDKADLRLIYLALAHMIKFRGHFLIEGDLNPDNSDVDKLFIQLVQTYNQLFEENPINASGVDAKAILSARLSKSRRLENLIAQLPGEKKNGLFGNLIALSLGLTPNFKSNFDLAEDAKLQLSKDTYDDDLDNLLAQIGDQYADLFLAAKNLSDAILLSDILRVNTEITKAPLSASMIKRYDEHHQDLTLLKALVRQQLPEKYKEIFFDQSKNGYAGYIDGGASQEEFYKFIKPILEKMDGTEELLVKLNREDLLRKQRTFDNGSIPHQIHLGELHAILRRQEDFYPFLKDNREKIEKILTFRIPYYVGPLARGNSRFAWMTRKSEETITPWNFEEVVDKGASAQSFIERMTNFDKNLPNEKVLPKHSLLYEYFTVYNELTKVKYVTEGMRKPAFLSGEQKKAIVDLLFKTNRKVTVKQLKEDYFKKIECFDSVEISGVEDRFNASLGTYHDLLKIIKDKDFLDNEENEDILEDIVLTLTLFEDREMIEERLKTYAHLFDDKVMKQLKRRRYTGWGRLSRKLINGIRDKQSGKTILDFLKSDGFANRNFMQLIHDDSLTFKEDIQKAQVSGQGDSLHEHIANLAGSPAIKKGILQTVKVVDELVKVMGRHKPENIVIEMARENQTTQKGQKNSRERMKRIEEGIKELGSQILKEHPVENTQLQNEKLYLYYLQNGRDMYVDQELDINRLSDYDVDAIVPQSFLKDDSIDNKVLTRSDKNRGKSDNVPSEEVVKKMKNYWRQLLNAKLITQRKFDNLTKAERGGLSELDKAGFIKRQLVETRQITKHVAQILDSRMNTKYDENDKLIREVKVITLKSKLVSDFRKDFQFYKVREINNYHHAHDAYLNAVVGTALIKKYPKLESEFVYGDYKVYDVRKMIAKSEQEIGKATAKYFFYSNIMNFFKTEITLANGEIRKRPLIETNGETGEIVWDKGRDFATVRKVLSMPQVNIVKKTEVQTGGFSKESILPKRNSDKLIARKKDWDPKKYGGFDSPTVAYSVLVVAKVEKGKSKKLKSVKELLGITIMERSSFEKNPIDFLEAKGYKEVKKDLIIKLPKYSLFELENGRKRMLASAGELQKGNELALPSKYVNFLYLASHYEKLKGSPEDNEQKQLFVEQHKHYLDEIIEQISEFSKRVILADANLDKVLSAYNKHRDKPIREQAENIIHLFTLTNLGAPAAFKYFDTTIDRKRYTSTKEVLDATLIHQSITGLYETRIDLSQLGGDSGGSSGGSSGSETPGTSESATPESSGGSSGGSSTIEVQRWEDKFEIKPGVWVYVPSVEARKVGGKILQAVRNKWIPPLYFYHLRTGGHLKAARLHLKSDFFAVVDIKQFFQSTSRSRITRDLKSYFTYSQAREISTFSTVRNLSHSPNKHVLPFGFVQSPILATLCLDKSYFGSLLRRLNKHHDLKLSVFMDDVIISSNNLAQLQAAYDEALVAMRKSGYQANMSKTQAPSSKISVFNLTLSKGVMKVTSQKMSDFLIDFYSSNYEPHRIGVKNYVEAVNPGQAKLFKLSGGSKRTADGSEFEPKKKRKV

SEQ ID NO: 1298 - protein, 1696 aa, synthetic construct
MKRTADGSEFESPKKKRKVDKKYSIGLDIGTNSVGWAVITDEYKVPSKKFKVLGNTDRHSIKKNLIGALLFDSGETAEATRLKRTARRRYTRRKNRICYLQEIFSNEMAKVDDSFFHRLEESFLVEEDKKHERHPIFGNIVDEVAYHEKYPTIYHLRKKLVDSTDKADLRLIYLALAHMIKFRGHFLIEGDLNPDNSDVDKLFIQLVQTYNQLFEENPINASGVDAKAILSARLSKSRRLENLIAQLPGEKKNGLFGNLIALSLGLTPNFKSNFDLAEDAKLQLSKDTYDDDLDNLLAQIGDQYADLFLAAKNLSDAILLSDILRVNTEITKAPLSASMIKRYDEHHQDLTLLKALVRQQLPEKYKEIFFDQSKNGYAGYIDGGASQEEFYKFIKPILEKMDGTEELLVKLNREDLLRKQRTFDNGSIPHQIHLGELHAILRRQEDFYPFLKDNREKIEKILTFRIPYYVGPLARGNSRFAWMTRKSEETITPWNFEEVVDKGASAQSFIERMTNFDKNLPNEKVLPKHSLLYEYFTVYNELTKVKYVTEGMRKPAFLSGEQKKAIVDLLFKTNRKVTVKQLKEDYFKKIECFDSVEISGVEDRFNASLGTYHDLLKIIKDKDFLDNEENEDILEDIVLTLTLFEDREMIEERLKTYAHLFDDKVMKQLKRRRYTGWGRLSRKLINGIRDKQSGKTILDFLKSDGFANRNFMQLIHDDSLTFKEDIQKAQVSGQGDSLHEHIANLAGSPAIKKGILQTVKVVDELVKVMGRHKPENIVIEMARENQTTQKGQKNSRERMKRIEEGIKELGSQILKEHPVENTQLQNEKLYLYYLQNGRDMYVDQELDINRLSDYDVDAIVPQSFLKDDSIDNKVLTRSDKNRGKSDNVPSEEVVKKMKNYWRQLLNAKLITQRKFDNLTKAERGGLSELDKAGFIKRQLVETRQITKHVAQILDSRMNTKYDENDKLIREVKVITLKSKLVSDFRKDFQFYKVREINNYHHAHDAYLNAVVGTALIKKYPKLESEFVYGDYKVYDVRKMIAKSEQEIGKATAKYFFYSNIMNFFKTEITLANGEIRKRPLIETNGETGEIVWDKGRDFATVRKVLSMPQVNIVKKTEVQTGGFSKESILPKRNSDKLIARKKDWDPKKYGGFDSPTVAYSVLVVAKVEKGKSKKLKSVKELLGITIMERSSFEKNPIDFLEAKGYKEVKKDLIIKLPKYSLFELENGRKRMLASAGELQKGNELALPSKYVNFLYLASHYEKLKGSPEDNEQKQLFVEQHKHYLDEIIEQISEFSKRVILADANLDKVLSAYNKHRDKPIREQAENIIHLFTLTNLGAPAAFKYFDTTIDRKRYTSTKEVLDATLIHQSITGLYETRIDLSQLGGDSGGSSGGSSGSETPGTSESATPESSGGSSGGSSTIEVQRWEDKFEIKPGVWVYVPSVEARKVGGKILQAVRNKWIPPLYFYHLRTGGHLKAARLHLKSDFFAVVDIKQFFQSTSRSRITRDLKSYFTYSQAREISTFSTVRNLSHSPHKHVLPFGFVQSPILATLCLDKSYFGSLLRRLNKHHDLKLSVFMDDVIISSNNLAQLQAAYDEALVAMRKSGYQANMSKTQAPSSKISVFNLTLSKGVMKVTSQKMSDFLIDFQSSNYEPHRIGVKNYVEAVNPGQAKLFKLSGGSKRTADGSEFEPKKKRKV

SEQ ID NO: 1299 - protein, 1696 aa, synthetic construct
MKRTADGSEFESPKKKRKVDKKYSIGLDIGTNSVGWAVITDEYKVPSKKFKVLGNTDRHSIKKNLIGALLFDSGETAEATRLKRTARRRYTRRKNRICYLQEIFSNEMAKVDDSFFHRLEESFLVEEDKKHERHPIFGNIVDEVAYHEKYPTIYHLRKKLVDSTDKADLRLIYLALAHMIKFRGHFLIEGDLNPDNSDVDKLFIQLVQTYNQLFEENPINASGVDAKAILSARLSKSRRLENLIAQLPGEKKNGLFGNLIALSLGLTPNFKSNFDLAEDAKLQLSKDTYDDDLDNLLAQIGDQYADLFLAAKNLSDAILLSDILRVNTEITKAPLSASMIKRYDEHHQDLTLLKALVRQQLPEKYKEIFFDQSKNGYAGYIDGGASQEEFYKFIKPILEKMDGTEELLVKLNREDLLRKQRTFDNGSIPHQIHLGELHAILRRQEDFYPFLKDNREKIEKILTFRIPYYVGPLARGNSRFAWMTRKSEETITPWNFEEVVDKGASAQSFIERMTNFDKNLPNEKVLPKHSLLYEYFTVYNELTKVKYVTEGMRKPAFLSGEQKKAIVDLLFKTNRKVTVKQLKEDYFKKIECFDSVEISGVEDRFNASLGTYHDLLKIIKDKDFLDNEENEDILEDIVLTLTLFEDREMIEERLKTYAHLFDDKVMKQLKRRRYTGWGRLSRKLINGIRDKQSGKTILDFLKSDGFANRNFMQLIHDDSLTFKEDIQKAQVSGQGDSLHEHIANLAGSPAIKKGILQTVKVVDELVKVMGRHKPENIVIEMARENQTTQKGQKNSRERMKRIEEGIKELGSQILKEHPVENTQLQNEKLYLYYLQNGRDMYVDQELDINRLSDYDVDAIVPQSFLKDDSIDNKVLTRSDKNRGKSDNVPSEEVVKKMKNYWRQLLNAKLITQRKFDNLTKAERGGLSELDKAGFIKRQLVETRQITKHVAQILDSRMNTKYDENDKLIREVKVITLKSKLVSDFRKDFQFYKVREINNYHHAHDAYLNAVVGTALIKKYPKLESEFVYGDYKVYDVRKMIAKSEQEIGKATAKYFFYSNIMNFFKTEITLANGEIRKRPLIETNGETGEIVWDKGRDFATVRKVLSMPQVNIVKKTEVQTGGFSKESILPKRNSDKLIARKKDWDPKKYGGFDSPTVAYSVLVVAKVEKGKSKKLKSVKELLGITIMERSSFEKNPIDFLEAKGYKEVKKDLIIKLPKYSLFELENGRKRMLASAGELQKGNELALPSKYVNFLYLASHYEKLKGSPEDNEQKQLFVEQHKHYLDEIIEQISEFSKRVILADANLDKVLSAYNKHRDKPIREQAENIIHLFTLTNLGAPAAFKYFDTTIDRKRYTSTKEVLDATLIHQSITGLYETRIDLSQLGGDSGGSSGGSSGSETPGTSESATPESSGGSSGGSSTIEVQRWEDKFEIKPGVWVYVPSVEARKVGGKILQAVRNKWIPPLYFYHLRTGGHLKAARLHLKSDFFAVVDIQQFFQSTSRSRITRDLASYFTYSQAREISTFSTVRNLSHSPHKHVLPFGFVQSPILATLCLDKSYFGSLLRRLNKHHDLKLSVFMDDVIISSNNLAQLQAAYDEALVAMRKSGYQANMSKTQAPSSKISVFNLTLSKGVMKVTSQKMSDFLIKFYSSNYEPHRIGVKNYVEAVNPGQAKLFKLSGGSKRTADGSEFEPKKKRKV

SEQ ID NO: 1300 - protein, 1696 aa, synthetic construct
MKRTADGSEFESPKKKRKVDKKYSIGLDIGTNSVGWAVITDEYKVPSKKFKVLGNTDRHSIKKNLIGALLFDSGETAEATRLKRTARRRYTRRKNRICYLQEIFSNEMAKVDDSFFHRLEESFLVEEDKKHERHPIFGNIVDEVAYHEKYPTIYHLRKKLVDSTDKADLRLIYLALAHMIKFRGHFLIEGDLNPDNSDVDKLFIQLVQTYNQLFEENPINASGVDAKAILSARLSKSRRLENLIAQLPGEKKNGLFGNLIALSLGLTPNFKSNFDLAEDAKLQLSKDTYDDDLDNLLAQIGDQYADLFLAAKNLSDAILLSDILRVNTEITKAPLSASMIKRYDEHHQDLTLLKALVRQQLPEKYKEIFFDQSKNGYAGYIDGGASQEEFYKFIKPILEKMDGTEELLVKLNREDLLRKQRTFDNGSIPHQIHLGELHAILRRQEDFYPFLKDNREKIEKILTFRIPYYVGPLARGNSRFAWMTRKSEETITPWNFEEVVDKGASAQSFIERMTNFDKNLPNEKVLPKHSLLYEYFTVYNELTKVKYVTEGMRKPAFLSGEQKKAIVDLLFKTNRKVTVKQLKEDYFKKIECFDSVEISGVEDRFNASLGTYHDLLKIIKDKDFLDNEENEDILEDIVLTLTLFEDREMIEERLKTYAHLFDDKVMKQLKRRRYTGWGRLSRKLINGIRDKQSGKTILDFLKSDGFANRNFMQLIHDDSLTFKEDIQKAQVSGQGDSLHEHIANLAGSPAIKKGILQTVKVVDELVKVMGRHKPENIVIEMARENQTTQKGQKNSRERMKRIEEGIKELGSQILKEHPVENTQLQNEKLYLYYLQNGRDMYVDQELDINRLSDYDVDAIVPQSFLKDDSIDNKVLTRSDKNRGKSDNVPSEEVVKKMKNYWRQLLNAKLITQRKFDNLTKAERGGLSELDKAGFIKRQLVETRQITKHVAQILDSRMNTKYDENDKLIREVKVITLKSKLVSDFRKDFQFYKVREINNYHHAHDAYLNAVVGTALIKKYPKLESEFVYGDYKVYDVRKMIAKSEQEIGKATAKYFFYSNIMNFFKTEITLANGEIRKRPLIETNGETGEIVWDKGRDFATVRKVLSMPQVNIVKKTEVQTGGFSKESILPKRNSDKLIARKKDWDPKKYGGFDSPTVAYSVLVVAKVEKGKSKKLKSVKELLGITIMERSSFEKNPIDFLEAKGYKEVKKDLIIKLPKYSLFELENGRKRMLASAGELQKGNELALPSKYVNFLYLASHYEKLKGSPEDNEQKQLFVEQHKHYLDEIIEQISEFSKRVILADANLDKVLSAYNKHRDKPIREQAENIIHLFTLTNLGAPAAFKYFDTTIDRKRYTSTKEVLDATLIHQSITGLYETRIDLSQLGGDSGGSSGGSSGSETPGTSESATPESSGGSSGGSSTIEVQRWEDKFEIKPGVWVYVPSVEARKVGGKILQAVRNKWIPPLYFYHLRTGGHLKAARLHLKSDFFAVVDIKQFFQSTSRDRITRDLKSYFTYSQAREISTGSTVRNLSHSPHKHVLPFGFVQSPILATLCLDKSYFGSLLRRLNKHHDLKLSVFMDDVIISSNNLAQLQAAYDEALVAMRKSGYQANMSKTQAPSSKIFVFNLTLSKGVMKVTSQKMSDFLIDFYSSNYEPHRIGVKNYVEAVNPGQAKLFKLSGGSKRTADGSEFEPKKKRKV

SEQ ID NO: 1301 - protein, 1696 aa, synthetic construct
MKRTADGSEFESPKKKRKVDKKYSIGLDIGTNSVGWAVITDEYKVPSKKFKVLGNTDRHSIKKNLIGALLFDSGETAEATRLKRTARRRYTRRKNRICYLQEIFSNEMAKVDDSFFHRLEESFLVEEDKKHERHPIFGNIVDEVAYHEKYPTIYHLRKKLVDSTDKADLRLIYLALAHMIKFRGHFLIEGDLNPDNSDVDKLFIQLVQTYNQLFEENPINASGVDAKAILSARLSKSRRLENLIAQLPGEKKNGLFGNLIALSLGLTPNFKSNFDLAEDAKLQLSKDTYDDDLDNLLAQIGDQYADLFLAAKNLSDAILLSDILRVNTEITKAPLSASMIKRYDEHHQDLTLLKALVRQQLPEKYKEIFFDQSKNGYAGYIDGGASQEEFYKFIKPILEKMDGTEELLVKLNREDLLRKQRTFDNGSIPHQIHLGELHAILRRQEDFYPFLKDNREKIEKILTFRIPYYVGPLARGNSRFAWMTRKSEETITPWNFEEVVDKGASAQSFIERMTNFDKNLPNEKVLPKHSLLYEYFTVYNELTKVKYVTEGMRKPAFLSGEQKKAIVDLLFKTNRKVTVKQLKEDYFKKIECFDSVEISGVEDRFNASLGTYHDLLKIIKDKDFLDNEENEDILEDIVLTLTLFEDREMIEERLKTYAHLFDDKVMKQLKRRRYTGWGRLSRKLINGIRDKQSGKTILDFLKSDGFANRNFMQLIHDDSLTFKEDIQKAQVSGQGDSLHEHIANLAGSPAIKKGILQTVKVVDELVKVMGRHKPENIVIEMARENQTTQKGQKNSRERMKRIEEGIKELGSQILKEHPVENTQLQNEKLYLYYLQNGRDMYVDQELDINRLSDYDVDAIVPQSFLKDDSIDNKVLTRSDKNRGKSDNVPSEEVVKKMKNYWRQLLNAKLITQRKFDNLTKAERGGLSELDKAGFIKRQLVETRQITKHVAQILDSRMNTKYDENDKLIREVKVITLKSKLVSDFRKDFQFYKVREINNYHHAHDAYLNAVVGTALIKKYPKLESEFVYGDYKVYDVRKMIAKSEQEIGKATAKYFFYSNIMNFFKTEITLANGEIRKRPLIETNGETGEIVWDKGRDFATVRKVLSMPQVNIVKKTEVQTGGFSKESILPKRNSDKLIARKKDWDPKKYGGFDSPTVAYSVLVVAKVEKGKSKKLKSVKELLGITIMERSSFEKNPIDFLEAKGYKEVKKDLIIKLPKYSLFELENGRKRMLASAGELQKGNELALPSKYVNFLYLASHYEKLKGSPEDNEQKQLFVEQHKHYLDEIIEQISEFSKRVILADANLDKVLSAYNKHRDKPIREQAENIIHLFTLTNLGAPAAFKYFDTTIDRKRYTSTKEVLDATLIHQSITGLYETRIDLSQLGGDSGGSSGGSSGSETPGTSESATPESSGGSSGGSSTIEVQRWEDKFEIKPGVWVYVPSVEARKVGGKILQAVRNKWIPPLYFYHLRTGGHLKAARLHCKSDFFAVVDIKQFFQSTSRSRITRDLKSYFTYSQARAISTFSTVENLSHSPHKHVLPFGFVQSPILATLCLDKSYFGSLLRRVNKHHDLKLSVFMDDVIISSNNLAQLQAAYDEALVAMRKSGYQANMSKTQAPSSKISVFNLTLSKGVMKVTSQKMSDFLIDFYSSNYEPHRIGVKNYVEAVNPGQAKLFKLSGGSKRTADGSEFEPKKKRKV

SEQ ID NO: 1302 - protein, 1696 aa, synthetic construct
MKRTADGSEFESPKKKRKVDKKYSIGLDIGTNSVGWAVITDEYKVPSKKFKVLGNTDRHSIKKNLIGALLFDSGETAEATRLKRTARRRYTRRKNRICYLQEIFSNEMAKVDDSFFHRLEESFLVEEDKKHERHPIFGNIVDEVAYHEKYPTIYHLRKKLVDSTDKADLRLIYLALAHMIKFRGHFLIEGDLNPDNSDVDKLFIQLVQTYNQLFEENPINASGVDAKAILSARLSKSRRLENLIAQLPGEKKNGLFGNLIALSLGLTPNFKSNFDLAEDAKLQLSKDTYDDDLDNLLAQIGDQYADLFLAAKNLSDAILLSDILRVNTEITKAPLSASMIKRYDEHHQDLTLLKALVRQQLPEKYKEIFFDQSKNGYAGYIDGGASQEEFYKFIKPILEKMDGTEELLVKLNREDLLRKQRTFDNGSIPHQIHLGELHAILRRQEDFYPFLKDNREKIEKILTFRIPYYVGPLARGNSRFAWMTRKSEETITPWNFEEVVDKGASAQSFIERMTNFDKNLPNEKVLPKHSLLYEYFTVYNELTKVKYVTEGMRKPAFLSGEQKKAIVDLLFKTNRKVTVKQLKEDYFKKIECFDSVEISGVEDRFNASLGTYHDLLKIIKDKDFLDNEENEDILEDIVLTLTLFEDREMIEERLKTYAHLFDDKVMKQLKRRRYTGWGRLSRKLINGIRDKQSGKTILDFLKSDGFANRNFMQLIHDDSLTFKEDIQKAQVSGQGDSLHEHIANLAGSPAIKKGILQTVKVVDELVKVMGRHKPENIVIEMARENQTTQKGQKNSRERMKRIEEGIKELGSQILKEHPVENTQLQNEKLYLYYLQNGRDMYVDQELDINRLSDYDVDAIVPQSFLKDDSIDNKVLTRSDKNRGKSDNVPSEEVVKKMKNYWRQLLNAKLITQRKFDNLTKAERGGLSELDKAGFIKRQLVETRQITKHVAQILDSRMNTKYDENDKLIREVKVITLKSKLVSDFRKDFQFYKVREINNYHHAHDAYLNAVVGTALIKKYPKLESEFVYGDYKVYDVRKMIAKSEQEIGKATAKYFFYSNIMNFFKTEITLANGEIRKRPLIETNGETGEIVWDKGRDFATVRKVLSMPQVNIVKKTEVQTGGFSKESILPKRNSDKLIARKKDWDPKKYGGFDSPTVAYSVLVVAKVEKGKSKKLKSVKELLGITIMERSSFEKNPIDFLEAKGYKEVKKDLIIKLPKYSLFELENGRKRMLASAGELQKGNELALPSKYVNFLYLASHYEKLKGSPEDNEQKQLFVEQHKHYLDEIIEQISEFSKRVILADANLDKVLSAYNKHRDKPIREQAENIIHLFTLTNLGAPAAFKYFDTTIDRKRYTSTKEVLDATLIHQSITGLYETRIDLSQLGGDSGGSSGGSSGSETPGTSESATPESSGGSSGGSSTIEVQEWEDKKEIKPGVWVKVPSVEARKVGGKILQAVRNKWIPPLYFYHLRTGGHLKAARLHLKSDFFAVVDIKQFFQSTSRSRIQRDLKSYFTYNQAREISTFSTVRNLFHSPHKHVLPFGFLQSPILATLCLDKSYFGSLLRRLNKHNDLKLSVWMDDVIISSNNLAQLQAAYDEALVAMRKSGYQANMSKTQAPQSKISVFNLTLSKGNMKVTSQKMSDFLIDFYSHNYEPHRIGVKNYVEAVNPGQAKLFKLSGGSKRTADGSEFEPKKKRKV

SEQ ID NO: 1303 - protein, 1696 aa, synthetic construct
MKRTADGSEFESPKKKRKVDKKYSIGLDIGTNSVGWAVITDEYKVPSKKFKVLGNTDRHSIKKNLIGALLFDSGETAEATRLKRTARRRYTRRKNRICYLQEIFSNEMAKVDDSFFHRLEESFLVEEDKKHERHPIFGNIVDEVAYHEKYPTIYHLRKKLVDSTDKADLRLIYLALAHMIKFRGHFLIEGDLNPDNSDVDKLFIQLVQTYNQLFEENPINASGVDAKAILSARLSKSRRLENLIAQLPGEKKNGLFGNLIALSLGLTPNFKSNFDLAEDAKLQLSKDTYDDDLDNLLAQIGDQYADLFLAAKNLSDAILLSDILRVNTEITKAPLSASMIKRYDEHHQDLTLLKALVRQQLPEKYKEIFFDQSKNGYAGYIDGGASQEEFYKFIKPILEKMDGTEELLVKLNREDLLRKQRTFDNGSIPHQIHLGELHAILRRQEDFYPFLKDNREKIEKILTFRIPYYVGPLARGNSRFAWMTRKSEETITPWNFEEVVDKGASAQSFIERMTNFDKNLPNEKVLPKHSLLYEYFTVYNELTKVKYVTEGMRKPAFLSGEQKKAIVDLLFKTNRKVTVKQLKEDYFKKIECFDSVEISGVEDRFNASLGTYHDLLKIIKDKDFLDNEENEDILEDIVLTLTLFEDREMIEERLKTYAHLFDDKVMKQLKRRRYTGWGRLSRKLINGIRDKQSGKTILDFLKSDGFANRNFMQLIHDDSLTFKEDIQKAQVSGQGDSLHEHIANLAGSPAIKKGILQTVKVVDELVKVMGRHKPENIVIEMARENQTTQKGQKNSRERMKRIEEGIKELGSQILKEHPVENTQLQNEKLYLYYLQNGRDMYVDQELDINRLSDYDVDAIVPQSFLKDDSIDNKVLTRSDKNRGKSDNVPSEEVVKKMKNYWRQLLNAKLITQRKFDNLTKAERGGLSELDKAGFIKRQLVETRQITKHVAQILDSRMNTKYDENDKLIREVKVITLKSKLVSDFRKDFQFYKVREINNYHHAHDAYLNAVVGTALIKKYPKLESEFVYGDYKVYDVRKMIAKSEQEIGKATAKYFFYSNIMNFFKTEITLANGEIRKRPLIETNGETGEIVWDKGRDFATVRKVLSMPQVNIVKKTEVQTGGFSKESILPKRNSDKLIARKKDWDPKKYGGFDSPTVAYSVLVVAKVEKGKSKKLKSVKELLGITIMERSSFEKNPIDFLEAKGYKEVKKDLIIKLPKYSLFELENGRKRMLASAGELQKGNELALPSKYVNFLYLASHYEKLKGSPEDNEQKQLFVEQHKHYLDEIIEQISEFSKRVILADANLDKVLSAYNKHRDKPIREQAENIIHLFTLTNLGAPAAFKYFDTTIDRKRYTSTKEVLDATLIHQSITGLYETRIDLSQLGGDSGGSSGGSSGSETPGTSESATPESSGGSSGGSSTIEVQRWEDKFEIKPGVWVYVPSVEARKVGGKILQAVRNKWIPPLYFYHLRTGGHLKAARLHLKSDFFAVVDIKQFFQSTSRSRITRDLKSYFTYSQAREISTFSTVRNLSHSPHKHVLPFGFVQSPILATLCLDKSYFGSLLRRLNKHHDLKLSVFMDDVIISSNNLAQLQAAYDEALVAMRKIGYQANMSKTQAPSSKISVFNLTLSKGVMKVTSQKMSDFLIDFYSSNYEPHRIGVKNYVEAVNPGQAKLFKLSGGSKRTADGSEFEPKKKRKV

SEQ ID NO: 1304 - protein, 1696 aa, synthetic construct
MKRTADGSEFESPKKKRKVDKKYSIGLDIGTNSVGWAVITDEYKVPSKKFKVLGNTDRHSIKKNLIGALLFDSGETAEATRLKRTARRRYTRRKNRICYLQEIFSNEMAKVDDSFFHRLEESFLVEEDKKHERHPIFGNIVDEVAYHEKYPTIYHLRKKLVDSTDKADLRLIYLALAHMIKFRGHFLIEGDLNPDNSDVDKLFIQLVQTYNQLFEENPINASGVDAKAILSARLSKSRRLENLIAQLPGEKKNGLFGNLIALSLGLTPNFKSNFDLAEDAKLQLSKDTYDDDLDNLLAQIGDQYADLFLAAKNLSDAILLSDILRVNTEITKAPLSASMIKRYDEHHQDLTLLKALVRQQLPEKYKEIFFDQSKNGYAGYIDGGASQEEFYKFIKPILEKMDGTEELLVKLNREDLLRKQRTFDNGSIPHQIHLGELHAILRRQEDFYPFLKDNREKIEKILTFRIPYYVGPLARGNSRFAWMTRKSEETITPWNFEEVVDKGASAQSFIERMTNFDKNLPNEKVLPKHSLLYEYFTVYNELTKVKYVTEGMRKPAFLSGEQKKAIVDLLFKTNRKVTVKQLKEDYFKKIECFDSVEISGVEDRFNASLGTYHDLLKIIKDKDFLDNEENEDILEDIVLTLTLFEDREMIEERLKTYAHLFDDKVMKQLKRRRYTGWGRLSRKLINGIRDKQSGKTILDFLKSDGFANRNFMQLIHDDSLTFKEDIQKAQVSGQGDSLHEHIANLAGSPAIKKGILQTVKVVDELVKVMGRHKPENIVIEMARENQTTQKGQKNSRERMKRIEEGIKELGSQILKEHPVENTQLQNEKLYLYYLQNGRDMYVDQELDINRLSDYDVDAIVPQSFLKDDSIDNKVLTRSDKNRGKSDNVPSEEVVKKMKNYWRQLLNAKLITQRKFDNLTKAERGGLSELDKAGFIKRQLVETRQITKHVAQILDSRMNTKYDENDKLIREVKVITLKSKLVSDFRKDFQFYKVREINNYHHAHDAYLNAVVGTALIKKYPKLESEFVYGDYKVYDVRKMIAKSEQEIGKATAKYFFYSNIMNFFKTEITLANGEIRKRPLIETNGETGEIVWDKGRDFATVRKVLSMPQVNIVKKTEVQTGGFSKESILPKRNSDKLIARKKDWDPKKYGGFDSPTVAYSVLVVAKVEKGKSKKLKSVKELLGITIMERSSFEKNPIDFLEAKGYKEVKKDLIIKLPKYSLFELENGRKRMLASAGELQKGNELALPSKYVNFLYLASHYEKLKGSPEDNEQKQLFVEQHKHYLDEIIEQISEFSKRVILADANLDKVLSAYNKHRDKPIREQAENIIHLFTLTNLGAPAAFKYFDTTIDRKRYTSTKEVLDATLIHQSITGLYETRIDLSQLGGDSGGSSGGSSGSETPGTSESATPESSGGSSGGSSTIEVQRDEDKFEIKPGVWVYVPSVEARKVGGKILQAVRNKWIPPLYFYHLRTGGHLKAARLHLKSDFFAVVDIKQFFQSTSRSRITRDLKSYFTYSQAREISTFSTVRNLSHSPHKHVLPFGFVQSPILATLCLDKSYFGSLLRRLNKHHDLKLSVFMDDVIISSNNLAQLQAAYDEALVAMRKSGYQANMSKTQAPSSKISVFNLTLSKGVMKVTSQKMSDFLIDFYSSNYEPHRIGVKNYVEAVNPGQAKLFKLSGGSKRTADGSEFEPKKKRKV

SEQ ID NO: 1305 - protein, 1696 aa, synthetic construct
MKRTADGSEFESPKKKRKVDKKYSIGLDIGTNSVGWAVITDEYKVPSKKFKVLGNTDRHSIKKNLIGALLFDSGETAEATRLKRTARRRYTRRKNRICYLQEIFSNEMAKVDDSFFHRLEESFLVEEDKKHERHPIFGNIVDEVAYHEKYPTIYHLRKKLVDSTDKADLRLIYLALAHMIKFRGHFLIEGDLNPDNSDVDKLFIQLVQTYNQLFEENPINASGVDAKAILSARLSKSRRLENLIAQLPGEKKNGLFGNLIALSLGLTPNFKSNFDLAEDAKLQLSKDTYDDDLDNLLAQIGDQYADLFLAAKNLSDAILLSDILRVNTEITKAPLSASMIKRYDEHHQDLTLLKALVRQQLPEKYKEIFFDQSKNGYAGYIDGGASQEEFYKFIKPILEKMDGTEELLVKLNREDLLRKQRTFDNGSIPHQIHLGELHAILRRQEDFYPFLKDNREKIEKILTFRIPYYVGPLARGNSRFAWMTRKSEETITPWNFEEVVDKGASAQSFIERMTNFDKNLPNEKVLPKHSLLYEYFTVYNELTKVKYVTEGMRKPAFLSGEQKKAIVDLLFKTNRKVTVKQLKEDYFKKIECFDSVEISGVEDRFNASLGTYHDLLKIIKDKDFLDNEENEDILEDIVLTLTLFEDREMIEERLKTYAHLFDDKVMKQLKRRRYTGWGRLSRKLINGIRDKQSGKTILDFLKSDGFANRNFMQLIHDDSLTFKEDIQKAQVSGQGDSLHEHIANLAGSPAIKKGILQTVKVVDELVKVMGRHKPENIVIEMARENQTTQKGQKNSRERMKRIEEGIKELGSQILKEHPVENTQLQNEKLYLYYLQNGRDMYVDQELDINRLSDYDVDAIVPQSFLKDDSIDNKVLTRSDKNRGKSDNVPSEEVVKKMKNYWRQLLNAKLITQRKFDNLTKAERGGLSELDKAGFIKRQLVETRQITKHVAQILDSRMNTKYDENDKLIREVKVITLKSKLVSDFRKDFQFYKVREINNYHHAHDAYLNAVVGTALIKKYPKLESEFVYGDYKVYDVRKMIAKSEQEIGKATAKYFFYSNIMNFFKTEITLANGEIRKRPLIETNGETGEIVWDKGRDFATVRKVLSMPQVNIVKKTEVQTGGFSKESILPKRNSDKLIARKKDWDPKKYGGFDSPTVAYSVLVVAKVEKGKSKKLKSVKELLGITIMERSSFEKNPIDFLEAKGYKEVKKDLIIKLPKYSLFELENGRKRMLASAGELQKGNELALPSKYVNFLYLASHYEKLKGSPEDNEQKQLFVEQHKHYLDEIIEQISEFSKRVILADANLDKVLSAYNKHRDKPIREQAENIIHLFTLTNLGAPAAFKYFDTTIDRKRYTSTKEVLDATLIHQSITGLYETRIDLSQLGGDSGGSSGGSSGSETPGTSESATPESSGGSSGGSSTIEVQRWEDKFEIKPGVWVYVPSVEARKVGGKILQKVRNKWIPPLYFYHLRTGGHLKAARLHLKSDFFAVVDIKQFFQSTSRDRITRDLKSYFTYSQAREISTGSTVRNLSHSPHKHVLPFGFVQSPILATLCLDKSYFGSLLRRLNKHHDLKLSVFMDDVIISSNNLAQLQAAYDEALVAMRKSGYQANMSKTQAPSSKIFVFNLTLSKGVMKVTSQKMSDFLIDFYSSNYEPHRIGVKNYVEAVNPGQAKLFKLSGGSKRTADGSEFEPKKKRKV

SEQ ID NO: 1306 - protein, 1696 aa, synthetic construct
MKRTADGSEFESPKKKRKVDKKYSIGLDIGTNSVGWAVITDEYKVPSKKFKVLGNTDRHSIKKNLIGALLFDSGETAEATRLKRTARRRYTRRKNRICYLQEIFSNEMAKVDDSFFHRLEESFLVEEDKKHERHPIFGNIVDEVAYHEKYPTIYHLRKKLVDSTDKADLRLIYLALAHMIKFRGHFLIEGDLNPDNSDVDKLFIQLVQTYNQLFEENPINASGVDAKAILSARLSKSRRLENLIAQLPGEKKNGLFGNLIALSLGLTPNFKSNFDLAEDAKLQLSKDTYDDDLDNLLAQIGDQYADLFLAAKNLSDAILLSDILRVNTEITKAPLSASMIKRYDEHHQDLTLLKALVRQQLPEKYKEIFFDQSKNGYAGYIDGGASQEEFYKFIKPILEKMDGTEELLVKLNREDLLRKQRTFDNGSIPHQIHLGELHAILRRQEDFYPFLKDNREKIEKILTFRIPYYVGPLARGNSRFAWMTRKSEETITPWNFEEVVDKGASAQSFIERMTNFDKNLPNEKVLPKHSLLYEYFTVYNELTKVKYVTEGMRKPAFLSGEQKKAIVDLLFKTNRKVTVKQLKEDYFKKIECFDSVEISGVEDRFNASLGTYHDLLKIIKDKDFLDNEENEDILEDIVLTLTLFEDREMIEERLKTYAHLFDDKVMKQLKRRRYTGWGRLSRKLINGIRDKQSGKTILDFLKSDGFANRNFMQLIHDDSLTFKEDIQKAQVSGQGDSLHEHIANLAGSPAIKKGILQTVKVVDELVKVMGRHKPENIVIEMARENQTTQKGQKNSRERMKRIEEGIKELGSQILKEHPVENTQLQNEKLYLYYLQNGRDMYVDQELDINRLSDYDVDAIVPQSFLKDDSIDNKVLTRSDKNRGKSDNVPSEEVVKKMKNYWRQLLNAKLITQRKFDNLTKAERGGLSELDKAGFIKRQLVETRQITKHVAQILDSRMNTKYDENDKLIREVKVITLKSKLVSDFRKDFQFYKVREINNYHHAHDAYLNAVVGTALIKKYPKLESEFVYGDYKVYDVRKMIAKSEQEIGKATAKYFFYSNIMNFFKTEITLANGEIRKRPLIETNGETGEIVWDKGRDFATVRKVLSMPQVNIVKKTEVQTGGFSKESILPKRNSDKLIARKKDWDPKKYGGFDSPTVAYSVLVVAKVEKGKSKKLKSVKELLGITIMERSSFEKNPIDFLEAKGYKEVKKDLIIKLPKYSLFELENGRKRMLASAGELQKGNELALPSKYVNFLYLASHYEKLKGSPEDNEQKQLFVEQHKHYLDEIIEQISEFSKRVILADANLDKVLSAYNKHRDKPIREQAENIIHLFTLTNLGAPAAFKYFDTTIDRKRYTSTKEVLDATLIHQSITGLYETRIDLSQLGGDSGGSSGGSSGSETPGTSESATPESSGGSSGGSSTIEVQRWEDKFEIKPGVWVYVPSVEARKVGGKILQAVRNKWIPPLYFYHLRTGGHLKAARLHLKSDFFAVVDIKQFFQSTQRSRITRDLRSYFTYSQAREISTFSTVRNLSHSPHKHVLPFGFVQSPILATLCLDKSYFGSLLRRLNKHHDLKLSVFMDDVIISSNNLAQLQAAYDEALVAMRKSGYQANMSKTQAPSSKISVFNLTLSKGVMKVTSQKMSDFLIDFYSSNYEPHRIGVKNYVEAVNPEQAKLFKLSGGSKRTADGSEFEPKKKRKV

SEQ ID NO: 1307 - protein, 1696 aa, synthetic construct
MKRTADGSEFESPKKKRKVDKKYSIGLDIGTNSVGWAVITDEYKVPSKKFKVLGNTDRHSIKKNLIGALLFDSGETAEATRLKRTARRRYTRRKNRICYLQEIFSNEMAKVDDSFFHRLEESFLVEEDKKHERHPIFGNIVDEVAYHEKYPTIYHLRKKLVDSTDKADLRLIYLALAHMIKFRGHFLIEGDLNPDNSDVDKLFIQLVQTYNQLFEENPINASGVDAKAILSARLSKSRRLENLIAQLPGEKKNGLFGNLIALSLGLTPNFKSNFDLAEDAKLQLSKDTYDDDLDNLLAQIGDQYADLFLAAKNLSDAILLSDILRVNTEITKAPLSASMIKRYDEHHQDLTLLKALVRQQLPEKYKEIFFDQSKNGYAGYIDGGASQEEFYKFIKPILEKMDGTEELLVKLNREDLLRKQRTFDNGSIPHQIHLGELHAILRRQEDFYPFLKDNREKIEKILTFRIPYYVGPLARGNSRFAWMTRKSEETITPWNFEEVVDKGASAQSFIERMTNFDKNLPNEKVLPKHSLLYEYFTVYNELTKVKYVTEGMRKPAFLSGEQKKAIVDLLFKTNRKVTVKQLKEDYFKKIECFDSVEISGVEDRFNASLGTYHDLLKIIKDKDFLDNEENEDILEDIVLTLTLFEDREMIEERLKTYAHLFDDKVMKQLKRRRYTGWGRLSRKLINGIRDKQSGKTILDFLKSDGFANRNFMQLIHDDSLTFKEDIQKAQVSGQGDSLHEHIANLAGSPAIKKGILQTVKVVDELVKVMGRHKPENIVIEMARENQTTQKGQKNSRERMKRIEEGIKELGSQILKEHPVENTQLQNEKLYLYYLQNGRDMYVDQELDINRLSDYDVDAIVPQSFLKDDSIDNKVLTRSDKNRGKSDNVPSEEVVKKMKNYWRQLLNAKLITQRKFDNLTKAERGGLSELDKAGFIKRQLVETRQITKHVAQILDSRMNTKYDENDKLIREVKVITLKSKLVSDFRKDFQFYKVREINNYHHAHDAYLNAVVGTALIKKYPKLESEFVYGDYKVYDVRKMIAKSEQEIGKATAKYFFYSNIMNFFKTEITLANGEIRKRPLIETNGETGEIVWDKGRDFATVRKVLSMPQVNIVKKTEVQTGGFSKESILPKRNSDKLIARKKDWDPKKYGGFDSPTVAYSVLVVAKVEKGKSKKLKSVKELLGITIMERSSFEKNPIDFLEAKGYKEVKKDLIIKLPKYSLFELENGRKRMLASAGELQKGNELALPSKYVNFLYLASHYEKLKGSPEDNEQKQLFVEQHKHYLDEIIEQISEFSKRVILADANLDKVLSAYNKHRDKPIREQAENIIHLFTLTNLGAPAAFKYFDTTIDRKRYTSTKEVLDATLIHQSITGLYETRIDLSQLGGDSGGSSGGSSGSETPGTSESATPESSGGSSGGSSTIEVQRWEDKFEIKPGVWVYVPSVEARKVGGKILQAVRNKWIPPLYFYHLRTGGHLKAARLHLKSDFFAVVDIKQFFQSTSRSRITRDLKSYFTYSQAREISTFSTVRNLSHSPHKHVLPFGFVQSPILATLCLDKSYFGSLLRRLNKHHCLKLSVFMDDVIISSNNLAQLQAAYDEALVAMRKSGYQANMSKTQAPSSKISVFNLTLSKGVMKVTSQKMSDFLIDFYSSNYEPHRIGVKNYVEAVNPGQAKLFKLSGGSKRTADGSEFEPKKKRKV

SEQ ID NO: 1308 - protein, 1696 aa, synthetic construct
MKRTADGSEFESPKKKRKVDKKYSIGLDIGTNSVGWAVITDEYKVPSKKFKVLGNTDRHSIKKNLIGALLFDSGETAEATRLKRTARRRYTRRKNRICYLQEIFSNEMAKVDDSFFHRLEESFLVEEDKKHERHPIFGNIVDEVAYHEKYPTIYHLRKKLVDSTDKADLRLIYLALAHMIKFRGHFLIEGDLNPDNSDVDKLFIQLVQTYNQLFEENPINASGVDAKAILSARLSKSRRLENLIAQLPGEKKNGLFGNLIALSLGLTPNFKSNFDLAEDAKLQLSKDTYDDDLDNLLAQIGDQYADLFLAAKNLSDAILLSDILRVNTEITKAPLSASMIKRYDEHHQDLTLLKALVRQQLPEKYKEIFFDQSKNGYAGYIDGGASQEEFYKFIKPILEKMDGTEELLVKLNREDLLRKQRTFDNGSIPHQIHLGELHAILRRQEDFYPFLKDNREKIEKILTFRIPYYVGPLARGNSRFAWMTRKSEETITPWNFEEVVDKGASAQSFIERMTNFDKNLPNEKVLPKHSLLYEYFTVYNELTKVKYVTEGMRKPAFLSGEQKKAIVDLLFKTNRKVTVKQLKEDYFKKIECFDSVEISGVEDRFNASLGTYHDLLKIIKDKDFLDNEENEDILEDIVLTLTLFEDREMIEERLKTYAHLFDDKVMKQLKRRRYTGWGRLSRKLINGIRDKQSGKTILDFLKSDGFANRNFMQLIHDDSLTFKEDIQKAQVSGQGDSLHEHIANLAGSPAIKKGILQTVKVVDELVKVMGRHKPENIVIEMARENQTTQKGQKNSRERMKRIEEGIKELGSQILKEHPVENTQLQNEKLYLYYLQNGRDMYVDQELDINRLSDYDVDAIVPQSFLKDDSIDNKVLTRSDKNRGKSDNVPSEEVVKKMKNYWRQLLNAKLITQRKFDNLTKAERGGLSELDKAGFIKRQLVETRQITKHVAQILDSRMNTKYDENDKLIREVKVITLKSKLVSDFRKDFQFYKVREINNYHHAHDAYLNAVVGTALIKKYPKLESEFVYGDYKVYDVRKMIAKSEQEIGKATAKYFFYSNIMNFFKTEITLANGEIRKRPLIETNGETGEIVWDKGRDFATVRKVLSMPQVNIVKKTEVQTGGFSKESILPKRNSDKLIARKKDWDPKKYGGFDSPTVAYSVLVVAKVEKGKSKKLKSVKELLGITIMERSSFEKNPIDFLEAKGYKEVKKDLIIKLPKYSLFELENGRKRMLASAGELQKGNELALPSKYVNFLYLASHYEKLKGSPEDNEQKQLFVEQHKHYLDEIIEQISEFSKRVILADANLDKVLSAYNKHRDKPIREQAENIIHLFTLTNLGAPAAFKYFDTTIDRKRYTSTKEVLDATLIHQSITGLYETRIDLSQLGGDSGGSSGGSSGSETPGTSESATPESSGGSSGGSSTIEVQRWEDKFEIKPGVWVYVPSVEARKVGGKILQAVRNKWIPPLYFYHLRTGGHLAAARLHLKSDFFAVVDIKQFFQSTSRERITRDLKSYFTYSQAREISTFSTVRNLSHSPHKHVLPFGFVQSPILATLCLDKSYFGSLLRRLNKHHDLKLSVFMDDVIISSNNLAQLQAAYDEALVAMRKSGYQFNMSKTQAPSSKISVFNLTLSKGVMKVTSQKMSDFLIDFYSSNYEPHRIGVKNYVEAVNPGQAKLFKLSGGSKRTADGSEFEPKKKRKV

SEQ ID NO: 1309 - protein, 1696 aa, synthetic construct
MKRTADGSEFESPKKKRKVDKKYSIGLDIGTNSVGWAVITDEYKVPSKKFKVLGNTDRHSIKKNLIGALLFDSGETAEATRLKRTARRRYTRRKNRICYLQEIFSNEMAKVDDSFFHRLEESFLVEEDKKHERHPIFGNIVDEVAYHEKYPTIYHLRKKLVDSTDKADLRLIYLALAHMIKFRGHFLIEGDLNPDNSDVDKLFIQLVQTYNQLFEENPINASGVDAKAILSARLSKSRRLENLIAQLPGEKKNGLFGNLIALSLGLTPNFKSNFDLAEDAKLQLSKDTYDDDLDNLLAQIGDQYADLFLAAKNLSDAILLSDILRVNTEITKAPLSASMIKRYDEHHQDLTLLKALVRQQLPEKYKEIFFDQSKNGYAGYIDGGASQEEFYKFIKPILEKMDGTEELLVKLNREDLLRKQRTFDNGSIPHQIHLGELHAILRRQEDFYPFLKDNREKIEKILTFRIPYYVGPLARGNSRFAWMTRKSEETITPWNFEEVVDKGASAQSFIERMTNFDKNLPNEKVLPKHSLLYEYFTVYNELTKVKYVTEGMRKPAFLSGEQKKAIVDLLFKTNRKVTVKQLKEDYFKKIECFDSVEISGVEDRFNASLGTYHDLLKIIKDKDFLDNEENEDILEDIVLTLTLFEDREMIEERLKTYAHLFDDKVMKQLKRRRYTGWGRLSRKLINGIRDKQSGKTILDFLKSDGFANRNFMQLIHDDSLTFKEDIQKAQVSGQGDSLHEHIANLAGSPAIKKGILQTVKVVDELVKVMGRHKPENIVIEMARENQTTQKGQKNSRERMKRIEEGIKELGSQILKEHPVENTQLQNEKLYLYYLQNGRDMYVDQELDINRLSDYDVDAIVPQSFLKDDSIDNKVLTRSDKNRGKSDNVPSEEVVKKMKNYWRQLLNAKLITQRKFDNLTKAERGGLSELDKAGFIKRQLVETRQITKHVAQILDSRMNTKYDENDKLIREVKVITLKSKLVSDFRKDFQFYKVREINNYHHAHDAYLNAVVGTALIKKYPKLESEFVYGDYKVYDVRKMIAKSEQEIGKATAKYFFYSNIMNFFKTEITLANGEIRKRPLIETNGETGEIVWDKGRDFATVRKVLSMPQVNIVKKTEVQTGGFSKESILPKRNSDKLIARKKDWDPKKYGGFDSPTVAYSVLVVAKVEKGKSKKLKSVKELLGITIMERSSFEKNPIDFLEAKGYKEVKKDLIIKLPKYSLFELENGRKRMLASAGELQKGNELALPSKYVNFLYLASHYEKLKGSPEDNEQKQLFVEQHKHYLDEIIEQISEFSKRVILADANLDKVLSAYNKHRDKPIREQAENIIHLFTLTNLGAPAAFKYFDTTIDRKRYTSTKEVLDATLIHQSITGLYETRIDLSQLGGDSGGSSGGSSGSETPGTSESATPESSGGSSGGSSTIEVQRWEDKFEIKPGVWVYVPSEEARKVGGKILQAVRNKWIPPLYFYHLRTGGHLKAARLHLKSDFFAVVDIKQFFQSTSRSRIDRDLKSYFTYSQAREISTFSTVRNLSHSPHKHVLPFGFVQSPILATLCLDKSYFGSLLRRLNKHHDLKLSVFMDDVIISSNNLAQLQAAYDEALVAMRKSGYQINMSKTQAPSSKISVFNLTLSKGVMKVTSQKMSDFLIDFYSSNYEPHRIGVKNYVEAVNPGQAKLFKLSGGSKRTADGSEFEPKKKRKV

SEQ ID NO: 1310 - protein, 1696 aa, synthetic construct
MKRTADGSEFESPKKKRKVDKKYSIGLDIGTNSVGWAVITDEYKVPSKKFKVLGNTDRHSIKKNLIGALLFDSGETAEATRLKRTARRRYTRRKNRICYLQEIFSNEMAKVDDSFFHRLEESFLVEEDKKHERHPIFGNIVDEVAYHEKYPTIYHLRKKLVDSTDKADLRLIYLALAHMIKFRGHFLIEGDLNPDNSDVDKLFIQLVQTYNQLFEENPINASGVDAKAILSARLSKSRRLENLIAQLPGEKKNGLFGNLIALSLGLTPNFKSNFDLAEDAKLQLSKDTYDDDLDNLLAQIGDQYADLFLAAKNLSDAILLSDILRVNTEITKAPLSASMIKRYDEHHQDLTLLKALVRQQLPEKYKEIFFDQSKNGYAGYIDGGASQEEFYKFIKPILEKMDGTEELLVKLNREDLLRKQRTFDNGSIPHQIHLGELHAILRRQEDFYPFLKDNREKIEKILTFRIPYYVGPLARGNSRFAWMTRKSEETITPWNFEEVVDKGASAQSFIERMTNFDKNLPNEKVLPKHSLLYEYFTVYNELTKVKYVTEGMRKPAFLSGEQKKAIVDLLFKTNRKVTVKQLKEDYFKKIECFDSVEISGVEDRFNASLGTYHDLLKIIKDKDFLDNEENEDILEDIVLTLTLFEDREMIEERLKTYAHLFDDKVMKQLKRRRYTGWGRLSRKLINGIRDKQSGKTILDFLKSDGFANRNFMQLIHDDSLTFKEDIQKAQVSGQGDSLHEHIANLAGSPAIKKGILQTVKVVDELVKVMGRHKPENIVIEMARENQTTQKGQKNSRERMKRIEEGIKELGSQILKEHPVENTQLQNEKLYLYYLQNGRDMYVDQELDINRLSDYDVDAIVPQSFLKDDSIDNKVLTRSDKNRGKSDNVPSEEVVKKMKNYWRQLLNAKLITQRKFDNLTKAERGGLSELDKAGFIKRQLVETRQITKHVAQILDSRMNTKYDENDKLIREVKVITLKSKLVSDFRKDFQFYKVREINNYHHAHDAYLNAVVGTALIKKYPKLESEFVYGDYKVYDVRKMIAKSEQEIGKATAKYFFYSNIMNFFKTEITLANGEIRKRPLIETNGETGEIVWDKGRDFATVRKVLSMPQVNIVKKTEVQTGGFSKESILPKRNSDKLIARKKDWDPKKYGGFDSPTVAYSVLVVAKVEKGKSKKLKSVKELLGITIMERSSFEKNPIDFLEAKGYKEVKKDLIIKLPKYSLFELENGRKRMLASAGELQKGNELALPSKYVNFLYLASHYEKLKGSPEDNEQKQLFVEQHKHYLDEIIEQISEFSKRVILADANLDKVLSAYNKHRDKPIREQAENIIHLFTLTNLGAPAAFKYFDTTIDRKRYTSTKEVLDATLIHQSITGLYETRIDLSQLGGDSGGSSGGSSGSETPGTSESATPESSGGSSGGSSTIEVFRNRDKFEIKPGVWVYVPSVSARKVGGKSLQAVRNKWTPPLYFYHLRTGGHLKAARLHLKSDFFAVVDIKQFFQSTSRSRITRDLTSYFTYSQAREISTFSTVRCLSHSPHKHVLPWGFVQSPILATLCLDKSYFGSLLRRGNCHHDLKLSVFMDDVIISSNNLAQLQAAYDEALVAMRKSGYQANRSKTQAPSSKISVFNLTLSKGVMKVTSQKMSDFLISFASSNYEPHRIGVKNYVEAVNPNQAKLFKLSGGSKRTADGSEFEPKKKRKV

SEQ ID NO: 1311 - protein, 1696 aa, synthetic construct
MKRTADGSEFESPKKKRKVDKKYSIGLDIGTNSVGWAVITDEYKVPSKKFKVLGNTDRHSIKKNLIGALLFDSGETAEATRLKRTARRRYTRRKNRICYLQEIFSNEMAKVDDSFFHRLEESFLVEEDKKHERHPIFGNIVDEVAYHEKYPTIYHLRKKLVDSTDKADLRLIYLALAHMIKFRGHFLIEGDLNPDNSDVDKLFIQLVQTYNQLFEENPINASGVDAKAILSARLSKSRRLENLIAQLPGEKKNGLFGNLIALSLGLTPNFKSNFDLAEDAKLQLSKDTYDDDLDNLLAQIGDQYADLFLAAKNLSDAILLSDILRVNTEITKAPLSASMIKRYDEHHQDLTLLKALVRQQLPEKYKEIFFDQSKNGYAGYIDGGASQEEFYKFIKPILEKMDGTEELLVKLNREDLLRKQRTFDNGSIPHQIHLGELHAILRRQEDFYPFLKDNREKIEKILTFRIPYYVGPLARGNSRFAWMTRKSEETITPWNFEEVVDKGASAQSFIERMTNFDKNLPNEKVLPKHSLLYEYFTVYNELTKVKYVTEGMRKPAFLSGEQKKAIVDLLFKTNRKVTVKQLKEDYFKKIECFDSVEISGVEDRFNASLGTYHDLLKIIKDKDFLDNEENEDILEDIVLTLTLFEDREMIEERLKTYAHLFDDKVMKQLKRRRYTGWGRLSRKLINGIRDKQSGKTILDFLKSDGFANRNFMQLIHDDSLTFKEDIQKAQVSGQGDSLHEHIANLAGSPAIKKGILQTVKVVDELVKVMGRHKPENIVIEMARENQTTQKGQKNSRERMKRIEEGIKELGSQILKEHPVENTQLQNEKLYLYYLQNGRDMYVDQELDINRLSDYDVDAIVPQSFLKDDSIDNKVLTRSDKNRGKSDNVPSEEVVKKMKNYWRQLLNAKLITQRKFDNLTKAERGGLSELDKAGFIKRQLVETRQITKHVAQILDSRMNTKYDENDKLIREVKVITLKSKLVSDFRKDFQFYKVREINNYHHAHDAYLNAVVGTALIKKYPKLESEFVYGDYKVYDVRKMIAKSEQEIGKATAKYFFYSNIMNFFKTEITLANGEIRKRPLIETNGETGEIVWDKGRDFATVRKVLSMPQVNIVKKTEVQTGGFSKESILPKRNSDKLIARKKDWDPKKYGGFDSPTVAYSVLVVAKVEKGKSKKLKSVKELLGITIMERSSFEKNPIDFLEAKGYKEVKKDLIIKLPKYSLFELENGRKRMLASAGELQKGNELALPSKYVNFLYLASHYEKLKGSPEDNEQKQLFVEQHKHYLDEIIEQISEFSKRVILADANLDKVLSAYNKHRDKPIREQAENIIHLFTLTNLGAPAAFKYFDTTIDRKRYTSTKEVLDATLIHQSITGLYETRIDLSQLGGDSGGSSGGSSGSETPGTSESATPESSGGSSGGSSTIEVQRWEDKFEIKPGVWVYVPSVEARKVGGKILQAVRNKWIPPLYFYHLRTGGHLKAARLHLKSDFFAVVDIKQFFQSTSRSRIERDLKSYFTPSQAREISTFSTVRNLNHSPHKHVLPGGFVQSPILATLCLDKSPFGSLLRRLNKHHDLKLSVFMDDVIISSNNLAQLQAAYDEALVAMRKSGYQANMSKTQAPSSKISVFNLTLSKGVMKVTSQKMSDFLIDFYSSNYEPHRIGVKNYVEAVNPGQAKLFKLSGGSKRTADGSEFEPKKKRKV

SEQ ID NO: 1312 - protein, 1696 aa, synthetic construct
MKRTADGSEFESPKKKRKVDKKYSIGLDIGTNSVGWAVITDEYKVPSKKFKVLGNTDRHSIKKNLIGALLFDSGETAEATRLKRTARRRYTRRKNRICYLQEIFSNEMAKVDDSFFHRLEESFLVEEDKKHERHPIFGNIVDEVAYHEKYPTIYHLRKKLVDSTDKADLRLIYLALAHMIKFRGHFLIEGDLNPDNSDVDKLFIQLVQTYNQLFEENPINASGVDAKAILSARLSKSRRLENLIAQLPGEKKNGLFGNLIALSLGLTPNFKSNFDLAEDAKLQLSKDTYDDDLDNLLAQIGDQYADLFLAAKNLSDAILLSDILRVNTEITKAPLSASMIKRYDEHHQDLTLLKALVRQQLPEKYKEIFFDQSKNGYAGYIDGGASQEEFYKFIKPILEKMDGTEELLVKLNREDLLRKQRTFDNGSIPHQIHLGELHAILRRQEDFYPFLKDNREKIEKILTFRIPYYVGPLARGNSRFAWMTRKSEETITPWNFEEVVDKGASAQSFIERMTNFDKNLPNEKVLPKHSLLYEYFTVYNELTKVKYVTEGMRKPAFLSGEQKKAIVDLLFKTNRKVTVKQLKEDYFKKIECFDSVEISGVEDRFNASLGTYHDLLKIIKDKDFLDNEENEDILEDIVLTLTLFEDREMIEERLKTYAHLFDDKVMKQLKRRRYTGWGRLSRKLINGIRDKQSGKTILDFLKSDGFANRNFMQLIHDDSLTFKEDIQKAQVSGQGDSLHEHIANLAGSPAIKKGILQTVKVVDELVKVMGRHKPENIVIEMARENQTTQKGQKNSRERMKRIEEGIKELGSQILKEHPVENTQLQNEKLYLYYLQNGRDMYVDQELDINRLSDYDVDAIVPQSFLKDDSIDNKVLTRSDKNRGKSDNVPSEEVVKKMKNYWRQLLNAKLITQRKFDNLTKAERGGLSELDKAGFIKRQLVETRQITKHVAQILDSRMNTKYDENDKLIREVKVITLKSKLVSDFRKDFQFYKVREINNYHHAHDAYLNAVVGTALIKKYPKLESEFVYGDYKVYDVRKMIAKSEQEIGKATAKYFFYSNIMNFFKTEITLANGEIRKRPLIETNGETGEIVWDKGRDFATVRKVLSMPQVNIVKKTEVQTGGFSKESILPKRNSDKLIARKKDWDPKKYGGFDSPTVAYSVLVVAKVEKGKSKKLKSVKELLGITIMERSSFEKNPIDFLEAKGYKEVKKDLIIKLPKYSLFELENGRKRMLASAGELQKGNELALPSKYVNFLYLASHYEKLKGSPEDNEQKQLFVEQHKHYLDEIIEQISEFSKRVILADANLDKVLSAYNKHRDKPIREQAENIIHLFTLTNLGAPAAFKYFDTTIDRKRYTSTKEVLDATLIHQSITGLYETRIDLSQLGGDSGGSSGGSSGSETPGTSESATPESSGGSSGGSSTIEVQRWEDKFEIKPGVWVYVPSVEARKVGGKILQAVRNKWIPPLYFYHLRTGGHLKAARLHLKSDFFAVVDIKQFFQSTSRSRITQDLLSYFKESQAREISTFSTVRNLSHSPHKHVLPLGFVQSPILATLCLDKSPFGSLLRRLNKHHDLKLSVFMDDVIISSNNLAQLQAAYDEALVAMRKSGYQANMSKTQAPSSKISVFNLTLSKGVMKVTSQKMSDFLIDFYSSNYEPHRIGVKNYVEAVNPGQAKLFKLSGGSKRTADGSEFEPKKKRKV

SEQ ID NO: 1313 - protein, 1696 aa, synthetic construct
MKRTADGSEFESPKKKRKVDKKYSIGLDIGTNSVGWAVITDEYKVPSKKFKVLGNTDRHSIKKNLIGALLFDSGETAEATRLKRTARRRYTRRKNRICYLQEIFSNEMAKVDDSFFHRLEESFLVEEDKKHERHPIFGNIVDEVAYHEKYPTIYHLRKKLVDSTDKADLRLIYLALAHMIKFRGHFLIEGDLNPDNSDVDKLFIQLVQTYNQLFEENPINASGVDAKAILSARLSKSRRLENLIAQLPGEKKNGLFGNLIALSLGLTPNFKSNFDLAEDAKLQLSKDTYDDDLDNLLAQIGDQYADLFLAAKNLSDAILLSDILRVNTEITKAPLSASMIKRYDEHHQDLTLLKALVRQQLPEKYKEIFFDQSKNGYAGYIDGGASQEEFYKFIKPILEKMDGTEELLVKLNREDLLRKQRTFDNGSIPHQIHLGELHAILRRQEDFYPFLKDNREKIEKILTFRIPYYVGPLARGNSRFAWMTRKSEETITPWNFEEVVDKGASAQSFIERMTNFDKNLPNEKVLPKHSLLYEYFTVYNELTKVKYVTEGMRKPAFLSGEQKKAIVDLLFKTNRKVTVKQLKEDYFKKIECFDSVEISGVEDRFNASLGTYHDLLKIIKDKDFLDNEENEDILEDIVLTLTLFEDREMIEERLKTYAHLFDDKVMKQLKRRRYTGWGRLSRKLINGIRDKQSGKTILDFLKSDGFANRNFMQLIHDDSLTFKEDIQKAQVSGQGDSLHEHIANLAGSPAIKKGILQTVKVVDELVKVMGRHKPENIVIEMARENQTTQKGQKNSRERMKRIEEGIKELGSQILKEHPVENTQLQNEKLYLYYLQNGRDMYVDQELDINRLSDYDVDAIVPQSFLKDDSIDNKVLTRSDKNRGKSDNVPSEEVVKKMKNYWRQLLNAKLITQRKFDNLTKAERGGLSELDKAGFIKRQLVETRQITKHVAQILDSRMNTKYDENDKLIREVKVITLKSKLVSDFRKDFQFYKVREINNYHHAHDAYLNAVVGTALIKKYPKLESEFVYGDYKVYDVRKMIAKSEQEIGKATAKYFFYSNIMNFFKTEITLANGEIRKRPLIETNGETGEIVWDKGRDFATVRKVLSMPQVNIVKKTEVQTGGFSKESILPKRNSDKLIARKKDWDPKKYGGFDSPTVAYSVLVVAKVEKGKSKKLKSVKELLGITIMERSSFEKNPIDFLEAKGYKEVKKDLIIKLPKYSLFELENGRKRMLASAGELQKGNELALPSKYVNFLYLASHYEKLKGSPEDNEQKQLFVEQHKHYLDEIIEQISEFSKRVILADANLDKVLSAYNKHRDKPIREQAENIIHLFTLTNLGAPAAFKYFDTTIDRKRYTSTKEVLDATLIHQSITGLYETRIDLSQLGGDSGGSSGGSSGSETPGTSESATPESSGGSSGGSSTIEVQRWEDKFEIKPGVWVYVPSVEARKVGGKILQAVRNKWIPPLYFYHLRTGGHLKAARLHLKSDFFAVVDIKQFFQSTNRSRITRDLKSYFTYSQAREISTFSTVRNLSHSPHDHVLPLGFVQSPILATLCLDKSPFGSLLRRLNKHHDLKLSVFMDDVIISSNNLAQLQAAYDEALVAMRKSGYQANMSKTQAPSSKISVFNLTLSKGVMKVTSQKMSDFLIDFYSSNYEPHRIGVKNYVEAVNPGQAKLFKLSGGSKRTADGSEFEPKKKRKV

SEQ ID NO: 1314 - protein, 1696 aa, synthetic construct
MKRTADGSEFESPKKKRKVDKKYSIGLDIGTNSVGWAVITDEYKVPSKKFKVLGNTDRHSIKKNLIGALLFDSGETAEATRLKRTARRRYTRRKNRICYLQEIFSNEMAKVDDSFFHRLEESFLVEEDKKHERHPIFGNIVDEVAYHEKYPTIYHLRKKLVDSTDKADLRLIYLALAHMIKFRGHFLIEGDLNPDNSDVDKLFIQLVQTYNQLFEENPINASGVDAKAILSARLSKSRRLENLIAQLPGEKKNGLFGNLIALSLGLTPNFKSNFDLAEDAKLQLSKDTYDDDLDNLLAQIGDQYADLFLAAKNLSDAILLSDILRVNTEITKAPLSASMIKRYDEHHQDLTLLKALVRQQLPEKYKEIFFDQSKNGYAGYIDGGASQEEFYKFIKPILEKMDGTEELLVKLNREDLLRKQRTFDNGSIPHQIHLGELHAILRRQEDFYPFLKDNREKIEKILTFRIPYYVGPLARGNSRFAWMTRKSEETITPWNFEEVVDKGASAQSFIERMTNFDKNLPNEKVLPKHSLLYEYFTVYNELTKVKYVTEGMRKPAFLSGEQKKAIVDLLFKTNRKVTVKQLKEDYFKKIECFDSVEISGVEDRFNASLGTYHDLLKIIKDKDFLDNEENEDILEDIVLTLTLFEDREMIEERLKTYAHLFDDKVMKQLKRRRYTGWGRLSRKLINGIRDKQSGKTILDFLKSDGFANRNFMQLIHDDSLTFKEDIQKAQVSGQGDSLHEHIANLAGSPAIKKGILQTVKVVDELVKVMGRHKPENIVIEMARENQTTQKGQKNSRERMKRIEEGIKELGSQILKEHPVENTQLQNEKLYLYYLQNGRDMYVDQELDINRLSDYDVDAIVPQSFLKDDSIDNKVLTRSDKNRGKSDNVPSEEVVKKMKNYWRQLLNAKLITQRKFDNLTKAERGGLSELDKAGFIKRQLVETRQITKHVAQILDSRMNTKYDENDKLIREVKVITLKSKLVSDFRKDFQFYKVREINNYHHAHDAYLNAVVGTALIKKYPKLESEFVYGDYKVYDVRKMIAKSEQEIGKATAKYFFYSNIMNFFKTEITLANGEIRKRPLIETNGETGEIVWDKGRDFATVRKVLSMPQVNIVKKTEVQTGGFSKESILPKRNSDKLIARKKDWDPKKYGGFDSPTVAYSVLVVAKVEKGKSKKLKSVKELLGITIMERSSFEKNPIDFLEAKGYKEVKKDLIIKLPKYSLFELENGRKRMLASAGELQKGNELALPSKYVNFLYLASHYEKLKGSPEDNEQKQLFVEQHKHYLDEIIEQISEFSKRVILADANLDKVLSAYNKHRDKPIREQAENIIHLFTLTNLGAPAAFKYFDTTIDRKRYTSTKEVLDATLIHQSITGLYETRIDLSQLGGDSGGSSGGSSGSETPGTSESATPESSGGSSGGSSTIEVQRWEDKFEIKPGVWVYVPSVEARKVGGKILQAVRNKWIPPLYFYHLRTGGHLKAARLHLKSDFFAVVDIKQFFQSTSRSMITRDLKSYFTPSQAREISTFSTVRNLSHSPHKHVLPFGFVQSPILATLCLDKSPYGSLLRRLNKHHDLKLSVFMDDVIISSNNLAQLQAAYDEALVAMRKSGYQANMSKTQAPSSKISVFNLTLSKGVMKVTSQKMSDFLIDFYSSNYEPHRIGVKNYVEAVNPGQAKLFKLSGGSKRTADGSEFEPKKKRKV

SEQ ID NO: 1315 - protein, 1696 aa, synthetic construct
MKRTADGSEFESPKKKRKVDKKYSIGLDIGTNSVGWAVITDEYKVPSKKFKVLGNTDRHSIKKNLIGALLFDSGETAEATRLKRTARRRYTRRKNRICYLQEIFSNEMAKVDDSFFHRLEESFLVEEDKKHERHPIFGNIVDEVAYHEKYPTIYHLRKKLVDSTDKADLRLIYLALAHMIKFRGHFLIEGDLNPDNSDVDKLFIQLVQTYNQLFEENPINASGVDAKAILSARLSKSRRLENLIAQLPGEKKNGLFGNLIALSLGLTPNFKSNFDLAEDAKLQLSKDTYDDDLDNLLAQIGDQYADLFLAAKNLSDAILLSDILRVNTEITKAPLSASMIKRYDEHHQDLTLLKALVRQQLPEKYKEIFFDQSKNGYAGYIDGGASQEEFYKFIKPILEKMDGTEELLVKLNREDLLRKQRTFDNGSIPHQIHLGELHAILRRQEDFYPFLKDNREKIEKILTFRIPYYVGPLARGNSRFAWMTRKSEETITPWNFEEVVDKGASAQSFIERMTNFDKNLPNEKVLPKHSLLYEYFTVYNELTKVKYVTEGMRKPAFLSGEQKKAIVDLLFKTNRKVTVKQLKEDYFKKIECFDSVEISGVEDRFNASLGTYHDLLKIIKDKDFLDNEENEDILEDIVLTLTLFEDREMIEERLKTYAHLFDDKVMKQLKRRRYTGWGRLSRKLINGIRDKQSGKTILDFLKSDGFANRNFMQLIHDDSLTFKEDIQKAQVSGQGDSLHEHIANLAGSPAIKKGILQTVKVVDELVKVMGRHKPENIVIEMARENQTTQKGQKNSRERMKRIEEGIKELGSQILKEHPVENTQLQNEKLYLYYLQNGRDMYVDQELDINRLSDYDVDAIVPQSFLKDDSIDNKVLTRSDKNRGKSDNVPSEEVVKKMKNYWRQLLNAKLITQRKFDNLTKAERGGLSELDKAGFIKRQLVETRQITKHVAQILDSRMNTKYDENDKLIREVKVITLKSKLVSDFRKDFQFYKVREINNYHHAHDAYLNAVVGTALIKKYPKLESEFVYGDYKVYDVRKMIAKSEQEIGKATAKYFFYSNIMNFFKTEITLANGEIRKRPLIETNGETGEIVWDKGRDFATVRKVLSMPQVNIVKKTEVQTGGFSKESILPKRNSDKLIARKKDWDPKKYGGFDSPTVAYSVLVVAKVEKGKSKKLKSVKELLGITIMERSSFEKNPIDFLEAKGYKEVKKDLIIKLPKYSLFELENGRKRMLASAGELQKGNELALPSKYVNFLYLASHYEKLKGSPEDNEQKQLFVEQHKHYLDEIIEQISEFSKRVILADANLDKVLSAYNKHRDKPIREQAENIIHLFTLTNLGAPAAFKYFDTTIDRKRYTSTKEVLDATLIHQSITGLYETRIDLSQLGGDSGGSSGGSSGSETPGTSESATPESSGGSSGGSSTIEVQRWEDKFEIKPGVWVYVPSVEARKVGGKILQAVRNKWIPPLYFYHLRTGGHLKAARLHLKSDFFAVVDIKQFFQSTSRSLITRDLLSYFKYSQAREISTFSTVRNLSHSPHKHVLPLGFVQSPILATLCLDKSYFGSLLRRLNKHHDLKLSVFMDDVIISSNNLAQLQAAYDEALVAMRKSGYQANMSKTQAPSSKISVFNLTLSKGVMKVTSQKMSDFLIDFYSSNYEPHRIGVKNYVEAVNPGQAKLFKLSGGSKRTADGSEFEPKKKRKV

SEQ ID NO: 1316 - protein, 1696 aa, synthetic construct
MKRTADGSEFESPKKKRKVDKKYSIGLDIGTNSVGWAVITDEYKVPSKKFKVLGNTDRHSIKKNLIGALLFDSGETAEATRLKRTARRRYTRRKNRICYLQEIFSNEMAKVDDSFFHRLEESFLVEEDKKHERHPIFGNIVDEVAYHEKYPTIYHLRKKLVDSTDKADLRLIYLALAHMIKFRGHFLIEGDLNPDNSDVDKLFIQLVQTYNQLFEENPINASGVDAKAILSARLSKSRRLENLIAQLPGEKKNGLFGNLIALSLGLTPNFKSNFDLAEDAKLQLSKDTYDDDLDNLLAQIGDQYADLFLAAKNLSDAILLSDILRVNTEITKAPLSASMIKRYDEHHQDLTLLKALVRQQLPEKYKEIFFDQSKNGYAGYIDGGASQEEFYKFIKPILEKMDGTEELLVKLNREDLLRKQRTFDNGSIPHQIHLGELHAILRRQEDFYPFLKDNREKIEKILTFRIPYYVGPLARGNSRFAWMTRKSEETITPWNFEEVVDKGASAQSFIERMTNFDKNLPNEKVLPKHSLLYEYFTVYNELTKVKYVTEGMRKPAFLSGEQKKAIVDLLFKTNRKVTVKQLKEDYFKKIECFDSVEISGVEDRFNASLGTYHDLLKIIKDKDFLDNEENEDILEDIVLTLTLFEDREMIEERLKTYAHLFDDKVMKQLKRRRYTGWGRLSRKLINGIRDKQSGKTILDFLKSDGFANRNFMQLIHDDSLTFKEDIQKAQVSGQGDSLHEHIANLAGSPAIKKGILQTVKVVDELVKVMGRHKPENIVIEMARENQTTQKGQKNSRERMKRIEEGIKELGSQILKEHPVENTQLQNEKLYLYYLQNGRDMYVDQELDINRLSDYDVDAIVPQSFLKDDSIDNKVLTRSDKNRGKSDNVPSEEVVKKMKNYWRQLLNAKLITQRKFDNLTKAERGGLSELDKAGFIKRQLVETRQITKHVAQILDSRMNTKYDENDKLIREVKVITLKSKLVSDFRKDFQFYKVREINNYHHAHDAYLNAVVGTALIKKYPKLESEFVYGDYKVYDVRKMIAKSEQEIGKATAKYFFYSNIMNFFKTEITLANGEIRKRPLIETNGETGEIVWDKGRDFATVRKVLSMPQVNIVKKTEVQTGGFSKESILPKRNSDKLIARKKDWDPKKYGGFDSPTVAYSVLVVAKVEKGKSKKLKSVKELLGITIMERSSFEKNPIDFLEAKGYKEVKKDLIIKLPKYSLFELENGRKRMLASAGELQKGNELALPSKYVNFLYLASHYEKLKGSPEDNEQKQLFVEQHKHYLDEIIEQISEFSKRVILADANLDKVLSAYNKHRDKPIREQAENIIHLFTLTNLGAPAAFKYFDTTIDRKRYTSTKEVLDATLIHQSITGLYETRIDLSQLGGDSGGSSGGSSGSETPGTSESATPESSGGSSGGSSTIEVQRWEDKFEIKPGVWVYVPSVEARKVGGKILQAVRNKWIPPLYFYHLRTGGHLKAARLHLKSDFFAVVDIKQFFQSTSRSRITRDLKSYFTYSQAREISTFSTVRNLSHSPHDHVLPLGFVQSPILATLCLDKSPFGSLLRRLNKHHDLKLSVFMDDVIISSNNLAQLQAAYDEALVAMRKSGYQANMSKTQAPSSKISVFNLTLSKGVMKVTSQKMSDFLIDFYSSNYEPHRIGVKNYVEAVNPGQAKLFKLSGGSKRTADGSEFEPKKKRKV

SEQ ID NO: 1317 - protein, 1696 aa, synthetic construct
MKRTADGSEFESPKKKRKVDKKYSIGLDIGTNSVGWAVITDEYKVPSKKFKVLGNTDRHSIKKNLIGALLFDSGETAEATRLKRTARRRYTRRKNRICYLQEIFSNEMAKVDDSFFHRLEESFLVEEDKKHERHPIFGNIVDEVAYHEKYPTIYHLRKKLVDSTDKADLRLIYLALAHMIKFRGHFLIEGDLNPDNSDVDKLFIQLVQTYNQLFEENPINASGVDAKAILSARLSKSRRLENLIAQLPGEKKNGLFGNLIALSLGLTPNFKSNFDLAEDAKLQLSKDTYDDDLDNLLAQIGDQYADLFLAAKNLSDAILLSDILRVNTEITKAPLSASMIKRYDEHHQDLTLLKALVRQQLPEKYKEIFFDQSKNGYAGYIDGGASQEEFYKFIKPILEKMDGTEELLVKLNREDLLRKQRTFDNGSIPHQIHLGELHAILRRQEDFYPFLKDNREKIEKILTFRIPYYVGPLARGNSRFAWMTRKSEETITPWNFEEVVDKGASAQSFIERMTNFDKNLPNEKVLPKHSLLYEYFTVYNELTKVKYVTEGMRKPAFLSGEQKKAIVDLLFKTNRKVTVKQLKEDYFKKIECFDSVEISGVEDRFNASLGTYHDLLKIIKDKDFLDNEENEDILEDIVLTLTLFEDREMIEERLKTYAHLFDDKVMKQLKRRRYTGWGRLSRKLINGIRDKQSGKTILDFLKSDGFANRNFMQLIHDDSLTFKEDIQKAQVSGQGDSLHEHIANLAGSPAIKKGILQTVKVVDELVKVMGRHKPENIVIEMARENQTTQKGQKNSRERMKRIEEGIKELGSQILKEHPVENTQLQNEKLYLYYLQNGRDMYVDQELDINRLSDYDVDAIVPQSFLKDDSIDNKVLTRSDKNRGKSDNVPSEEVVKKMKNYWRQLLNAKLITQRKFDNLTKAERGGLSELDKAGFIKRQLVETRQITKHVAQILDSRMNTKYDENDKLIREVKVITLKSKLVSDFRKDFQFYKVREINNYHHAHDAYLNAVVGTALIKKYPKLESEFVYGDYKVYDVRKMIAKSEQEIGKATAKYFFYSNIMNFFKTEITLANGEIRKRPLIETNGETGEIVWDKGRDFATVRKVLSMPQVNIVKKTEVQTGGFSKESILPKRNSDKLIARKKDWDPKKYGGFDSPTVAYSVLVVAKVEKGKSKKLKSVKELLGITIMERSSFEKNPIDFLEAKGYKEVKKDLIIKLPKYSLFELENGRKRMLASAGELQKGNELALPSKYVNFLYLASHYEKLKGSPEDNEQKQLFVEQHKHYLDEIIEQISEFSKRVILADANLDKVLSAYNKHRDKPIREQAENIIHLFTLTNLGAPAAFKYFDTTIDRKRYTSTKEVLDATLIHQSITGLYETRIDLSQLGGDSGGSSGGSSGSETPGTSESATPESSGGSSGGSSTIEVQRWEDKFEKKPGVWVYVPSVEARKVGGKILQAVRNKWIPPLYFYHLRTGGHLKAARLHLKSDFFAVVDIKQFFQSTNRSRITRDLSSYFTPSQAREISTFSTVRNLSHSPHDHVLPLGFVQSPILATLCLDKSPFGSLLRRLNKHHDLKLSVFMDDVIISSNNLAQLQAAYDEALVAMRKSGYQANMSKTQAPSSKISVFNLTLSKGVMKVTSQKMSDFLIDFYSSNYEPHRIGVKNYVEAVNPGQAKLFKLSGGSKRTADGSEFEPKKKRKV

SEQ ID NO: 1318 - protein, 1696 aa, synthetic construct
MKRTADGSEFESPKKKRKVDKKYSIGLDIGTNSVGWAVITDEYKVPSKKFKVLGNTDRHSIKKNLIGALLFDSGETAEATRLKRTARRRYTRRKNRICYLQEIFSNEMAKVDDSFFHRLEESFLVEEDKKHERHPIFGNIVDEVAYHEKYPTIYHLRKKLVDSTDKADLRLIYLALAHMIKFRGHFLIEGDLNPDNSDVDKLFIQLVQTYNQLFEENPINASGVDAKAILSARLSKSRRLENLIAQLPGEKKNGLFGNLIALSLGLTPNFKSNFDLAEDAKLQLSKDTYDDDLDNLLAQIGDQYADLFLAAKNLSDAILLSDILRVNTEITKAPLSASMIKRYDEHHQDLTLLKALVRQQLPEKYKEIFFDQSKNGYAGYIDGGASQEEFYKFIKPILEKMDGTEELLVKLNREDLLRKQRTFDNGSIPHQIHLGELHAILRRQEDFYPFLKDNREKIEKILTFRIPYYVGPLARGNSRFAWMTRKSEETITPWNFEEVVDKGASAQSFIERMTNFDKNLPNEKVLPKHSLLYEYFTVYNELTKVKYVTEGMRKPAFLSGEQKKAIVDLLFKTNRKVTVKQLKEDYFKKIECFDSVEISGVEDRFNASLGTYHDLLKIIKDKDFLDNEENEDILEDIVLTLTLFEDREMIEERLKTYAHLFDDKVMKQLKRRRYTGWGRLSRKLINGIRDKQSGKTILDFLKSDGFANRNFMQLIHDDSLTFKEDIQKAQVSGQGDSLHEHIANLAGSPAIKKGILQTVKVVDELVKVMGRHKPENIVIEMARENQTTQKGQKNSRERMKRIEEGIKELGSQILKEHPVENTQLQNEKLYLYYLQNGRDMYVDQELDINRLSDYDVDAIVPQSFLKDDSIDNKVLTRSDKNRGKSDNVPSEEVVKKMKNYWRQLLNAKLITQRKFDNLTKAERGGLSELDKAGFIKRQLVETRQITKHVAQILDSRMNTKYDENDKLIREVKVITLKSKLVSDFRKDFQFYKVREINNYHHAHDAYLNAVVGTALIKKYPKLESEFVYGDYKVYDVRKMIAKSEQEIGKATAKYFFYSNIMNFFKTEITLANGEIRKRPLIETNGETGEIVWDKGRDFATVRKVLSMPQVNIVKKTEVQTGGFSKESILPKRNSDKLIARKKDWDPKKYGGFDSPTVAYSVLVVAKVEKGKSKKLKSVKELLGITIMERSSFEKNPIDFLEAKGYKEVKKDLIIKLPKYSLFELENGRKRMLASAGELQKGNELALPSKYVNFLYLASHYEKLKGSPEDNEQKQLFVEQHKHYLDEIIEQISEFSKRVILADANLDKVLSAYNKHRDKPIREQAENIIHLFTLTNLGAPAAFKYFDTTIDRKRYTSTKEVLDATLIHQSITGLYETRIDLSQLGGDSGGSSGGSSGSETPGTSESATPESSGGSSGGSSTIEVQRWEDKFEIKPGVCVYVPSVEARKVGGKILQAVRNKWIPPLYFYHLRTGGHLKAARLHLKSDFFAVVDIKQFFQSTSRSRITRDLKSYFTYSQAREISTFSTVRNLSHSPHKHVLPFGFVQSPILATLCLDKSYFGSLLRRLNKHHDLKLSVFMDDVIISSNNLAQLQAAYDEALVAMRKSGYQANMSKTQAPSSKISVFNLTLSKGVMKVTSQKMSDFLIDFYSSNYEPHRIGVKNYVEAVNPGQAKLFKLSGGSKRTADGSEFEPKKKRKV

SEQ ID NO: 1319 - protein, 1696 aa, synthetic construct
MKRTADGSEFESPKKKRKVDKKYSIGLDIGTNSVGWAVITDEYKVPSKKFKVLGNTDRHSIKKNLIGALLFDSGETAEATRLKRTARRRYTRRKNRICYLQEIFSNEMAKVDDSFFHRLEESFLVEEDKKHERHPIFGNIVDEVAYHEKYPTIYHLRKKLVDSTDKADLRLIYLALAHMIKFRGHFLIEGDLNPDNSDVDKLFIQLVQTYNQLFEENPINASGVDAKAILSARLSKSRRLENLIAQLPGEKKNGLFGNLIALSLGLTPNFKSNFDLAEDAKLQLSKDTYDDDLDNLLAQIGDQYADLFLAAKNLSDAILLSDILRVNTEITKAPLSASMIKRYDEHHQDLTLLKALVRQQLPEKYKEIFFDQSKNGYAGYIDGGASQEEFYKFIKPILEKMDGTEELLVKLNREDLLRKQRTFDNGSIPHQIHLGELHAILRRQEDFYPFLKDNREKIEKILTFRIPYYVGPLARGNSRFAWMTRKSEETITPWNFEEVVDKGASAQSFIERMTNFDKNLPNEKVLPKHSLLYEYFTVYNELTKVKYVTEGMRKPAFLSGEQKKAIVDLLFKTNRKVTVKQLKEDYFKKIECFDSVEISGVEDRFNASLGTYHDLLKIIKDKDFLDNEENEDILEDIVLTLTLFEDREMIEERLKTYAHLFDDKVMKQLKRRRYTGWGRLSRKLINGIRDKQSGKTILDFLKSDGFANRNFMQLIHDDSLTFKEDIQKAQVSGQGDSLHEHIANLAGSPAIKKGILQTVKVVDELVKVMGRHKPENIVIEMARENQTTQKGQKNSRERMKRIEEGIKELGSQILKEHPVENTQLQNEKLYLYYLQNGRDMYVDQELDINRLSDYDVDAIVPQSFLKDDSIDNKVLTRSDKNRGKSDNVPSEEVVKKMKNYWRQLLNAKLITQRKFDNLTKAERGGLSELDKAGFIKRQLVETRQITKHVAQILDSRMNTKYDENDKLIREVKVITLKSKLVSDFRKDFQFYKVREINNYHHAHDAYLNAVVGTALIKKYPKLESEFVYGDYKVYDVRKMIAKSEQEIGKATAKYFFYSNIMNFFKTEITLANGEIRKRPLIETNGETGEIVWDKGRDFATVRKVLSMPQVNIVKKTEVQTGGFSKESILPKRNSDKLIARKKDWDPKKYGGFDSPTVAYSVLVVAKVEKGKSKKLKSVKELLGITIMERSSFEKNPIDFLEAKGYKEVKKDLIIKLPKYSLFELENGRKRMLASAGELQKGNELALPSKYVNFLYLASHYEKLKGSPEDNEQKQLFVEQHKHYLDEIIEQISEFSKRVILADANLDKVLSAYNKHRDKPIREQAENIIHLFTLTNLGAPAAFKYFDTTIDRKRYTSTKEVLDATLIHQSITGLYETRIDLSQLGGDSGGSSGGSSGSETPGTSESATPESSGGSSGGSSTIEVQRWEDKFEKKPGVWVYVPSVEARKVGGKILQAVRNKWIPPLYFYHLRTGGHLKAARLHLKSDFFAVVDIKQFFQSTDRERITEDLKSYFTYSQAREISTFSTVRNLSHSPHKHVLPLGFVQSPILATLCLDKSYFGSLLRRLNKHHDLKLSVFMDDVIISSNNLAQLQAAYDEALVAMRKSGYQANMSKTQAPSSKISVFNLTLSKGVMKVTSQKMSDFLIDFYSSNYEPHRIGVKNYVEAVNPGQAKLFKLSGGSKRTADGSEFEPKKKRKV

SEQ ID NO: 1320 - protein, 1696 aa, synthetic construct
MKRTADGSEFESPKKKRKVDKKYSIGLDIGTNSVGWAVITDEYKVPSKKFKVLGNTDRHSIKKNLIGALLFDSGETAEATRLKRTARRRYTRRKNRICYLQEIFSNEMAKVDDSFFHRLEESFLVEEDKKHERHPIFGNIVDEVAYHEKYPTIYHLRKKLVDSTDKADLRLIYLALAHMIKFRGHFLIEGDLNPDNSDVDKLFIQLVQTYNQLFEENPINASGVDAKAILSARLSKSRRLENLIAQLPGEKKNGLFGNLIALSLGLTPNFKSNFDLAEDAKLQLSKDTYDDDLDNLLAQIGDQYADLFLAAKNLSDAILLSDILRVNTEITKAPLSASMIKRYDEHHQDLTLLKALVRQQLPEKYKEIFFDQSKNGYAGYIDGGASQEEFYKFIKPILEKMDGTEELLVKLNREDLLRKQRTFDNGSIPHQIHLGELHAILRRQEDFYPFLKDNREKIEKILTFRIPYYVGPLARGNSRFAWMTRKSEETITPWNFEEVVDKGASAQSFIERMTNFDKNLPNEKVLPKHSLLYEYFTVYNELTKVKYVTEGMRKPAFLSGEQKKAIVDLLFKTNRKVTVKQLKEDYFKKIECFDSVEISGVEDRFNASLGTYHDLLKIIKDKDFLDNEENEDILEDIVLTLTLFEDREMIEERLKTYAHLFDDKVMKQLKRRRYTGWGRLSRKLINGIRDKQSGKTILDFLKSDGFANRNFMQLIHDDSLTFKEDIQKAQVSGQGDSLHEHIANLAGSPAIKKGILQTVKVVDELVKVMGRHKPENIVIEMARENQTTQKGQKNSRERMKRIEEGIKELGSQILKEHPVENTQLQNEKLYLYYLQNGRDMYVDQELDINRLSDYDVDAIVPQSFLKDDSIDNKVLTRSDKNRGKSDNVPSEEVVKKMKNYWRQLLNAKLITQRKFDNLTKAERGGLSELDKAGFIKRQLVETRQITKHVAQILDSRMNTKYDENDKLIREVKVITLKSKLVSDFRKDFQFYKVREINNYHHAHDAYLNAVVGTALIKKYPKLESEFVYGDYKVYDVRKMIAKSEQEIGKATAKYFFYSNIMNFFKTEITLANGEIRKRPLIETNGETGEIVWDKGRDFATVRKVLSMPQVNIVKKTEVQTGGFSKESILPKRNSDKLIARKKDWDPKKYGGFDSPTVAYSVLVVAKVEKGKSKKLKSVKELLGITIMERSSFEKNPIDFLEAKGYKEVKKDLIIKLPKYSLFELENGRKRMLASAGELQKGNELALPSKYVNFLYLASHYEKLKGSPEDNEQKQLFVEQHKHYLDEIIEQISEFSKRVILADANLDKVLSAYNKHRDKPIREQAENIIHLFTLTNLGAPAAFKYFDTTIDRKRYTSTKEVLDATLIHQSITGLYETRIDLSQLGGDSGGSSGGSSGSETPGTSESATPESSGGSSGGSSTIEVQRWEDKFEKKPGVWVYVPSVEARKVGGKILQAVRNKWIPPLYFYHLRTGGHLKAARLHLKSDFFAVVDIKQFFQSTSRDMITRDLLSYFKYSQAREISTFSTVRNLSHSPHKHVLPLGFVQSPILATLCLDKSYFGSLLRRLNKHHDLKLSVFMDDVIISSNNLAQLQAAYDEALVAMRKSGYQANMSKTQAPSSKISVFNLTLSKGVMKVTSQKMSDFLIDFYSSNYEPHRIGVKNYVEAVNPGQAKLFKLSGGSKRTADGSEFEPKKKRKV

SEQ ID NO: 1321 - protein, 1696 aa, synthetic construct
MKRTADGSEFESPKKKRKVDKKYSIGLDIGTNSVGWAVITDEYKVPSKKFKVLGNTDRHSIKKNLIGALLFDSGETAEATRLKRTARRRYTRRKNRICYLQEIFSNEMAKVDDSFFHRLEESFLVEEDKKHERHPIFGNIVDEVAYHEKYPTIYHLRKKLVDSTDKADLRLIYLALAHMIKFRGHFLIEGDLNPDNSDVDKLFIQLVQTYNQLFEENPINASGVDAKAILSARLSKSRRLENLIAQLPGEKKNGLFGNLIALSLGLTPNFKSNFDLAEDAKLQLSKDTYDDDLDNLLAQIGDQYADLFLAAKNLSDAILLSDILRVNTEITKAPLSASMIKRYDEHHQDLTLLKALVRQQLPEKYKEIFFDQSKNGYAGYIDGGASQEEFYKFIKPILEKMDGTEELLVKLNREDLLRKQRTFDNGSIPHQIHLGELHAILRRQEDFYPFLKDNREKIEKILTFRIPYYVGPLARGNSRFAWMTRKSEETITPWNFEEVVDKGASAQSFIERMTNFDKNLPNEKVLPKHSLLYEYFTVYNELTKVKYVTEGMRKPAFLSGEQKKAIVDLLFKTNRKVTVKQLKEDYFKKIECFDSVEISGVEDRFNASLGTYHDLLKIIKDKDFLDNEENEDILEDIVLTLTLFEDREMIEERLKTYAHLFDDKVMKQLKRRRYTGWGRLSRKLINGIRDKQSGKTILDFLKSDGFANRNFMQLIHDDSLTFKEDIQKAQVSGQGDSLHEHIANLAGSPAIKKGILQTVKVVDELVKVMGRHKPENIVIEMARENQTTQKGQKNSRERMKRIEEGIKELGSQILKEHPVENTQLQNEKLYLYYLQNGRDMYVDQELDINRLSDYDVDAIVPQSFLKDDSIDNKVLTRSDKNRGKSDNVPSEEVVKKMKNYWRQLLNAKLITQRKFDNLTKAERGGLSELDKAGFIKRQLVETRQITKHVAQILDSRMNTKYDENDKLIREVKVITLKSKLVSDFRKDFQFYKVREINNYHHAHDAYLNAVVGTALIKKYPKLESEFVYGDYKVYDVRKMIAKSEQEIGKATAKYFFYSNIMNFFKTEITLANGEIRKRPLIETNGETGEIVWDKGRDFATVRKVLSMPQVNIVKKTEVQTGGFSKESILPKRNSDKLIARKKDWDPKKYGGFDSPTVAYSVLVVAKVEKGKSKKLKSVKELLGITIMERSSFEKNPIDFLEAKGYKEVKKDLIIKLPKYSLFELENGRKRMLASAGELQKGNELALPSKYVNFLYLASHYEKLKGSPEDNEQKQLFVEQHKHYLDEIIEQISEFSKRVILADANLDKVLSAYNKHRDKPIREQAENIIHLFTLTNLGAPAAFKYFDTTIDRKRYTSTKEVLDATLIHQSITGLYETRIDLSQLGGDSGGSSGGSSGSETPGTSESATPESSGGSSGGSSTIEVQRWEDKFEKKPGVWVYVPSVEARKVGGKILQAVRNKWIPPLYFYHLRTGGHLKAARLHLKSDFFAVVDIKQFFQSTSRDRITQDLKSYFTYSQAREISTFSTVRNLSHSPHKHVLPLGFVQSPILATLCLDKSPFGSLLRRLNKHHDLKLSVFMDDVIISSNNLAQLQAAYDEALVAMRKSGYQANMSKTQAPSSKISVFNLTLSKGVMKVTSQKMSDFLIDFYSSNYEPHRIGVKNYVEAVNPGQAKLFKLSGGSKRTADGSEFEPKKKRKV

SEQ ID NO: 1322 - protein, 1696 aa, synthetic construct
MKRTADGSEFESPKKKRKVDKKYSIGLDIGTNSVGWAVITDEYKVPSKKFKVLGNTDRHSIKKNLIGALLFDSGETAEATRLKRTARRRYTRRKNRICYLQEIFSNEMAKVDDSFFHRLEESFLVEEDKKHERHPIFGNIVDEVAYHEKYPTIYHLRKKLVDSTDKADLRLIYLALAHMIKFRGHFLIEGDLNPDNSDVDKLFIQLVQTYNQLFEENPINASGVDAKAILSARLSKSRRLENLIAQLPGEKKNGLFGNLIALSLGLTPNFKSNFDLAEDAKLQLSKDTYDDDLDNLLAQIGDQYADLFLAAKNLSDAILLSDILRVNTEITKAPLSASMIKRYDEHHQDLTLLKALVRQQLPEKYKEIFFDQSKNGYAGYIDGGASQEEFYKFIKPILEKMDGTEELLVKLNREDLLRKQRTFDNGSIPHQIHLGELHAILRRQEDFYPFLKDNREKIEKILTFRIPYYVGPLARGNSRFAWMTRKSEETITPWNFEEVVDKGASAQSFIERMTNFDKNLPNEKVLPKHSLLYEYFTVYNELTKVKYVTEGMRKPAFLSGEQKKAIVDLLFKTNRKVTVKQLKEDYFKKIECFDSVEISGVEDRFNASLGTYHDLLKIIKDKDFLDNEENEDILEDIVLTLTLFEDREMIEERLKTYAHLFDDKVMKQLKRRRYTGWGRLSRKLINGIRDKQSGKTILDFLKSDGFANRNFMQLIHDDSLTFKEDIQKAQVSGQGDSLHEHIANLAGSPAIKKGILQTVKVVDELVKVMGRHKPENIVIEMARENQTTQKGQKNSRERMKRIEEGIKELGSQILKEHPVENTQLQNEKLYLYYLQNGRDMYVDQELDINRLSDYDVDAIVPQSFLKDDSIDNKVLTRSDKNRGKSDNVPSEEVVKKMKNYWRQLLNAKLITQRKFDNLTKAERGGLSELDKAGFIKRQLVETRQITKHVAQILDSRMNTKYDENDKLIREVKVITLKSKLVSDFRKDFQFYKVREINNYHHAHDAYLNAVVGTALIKKYPKLESEFVYGDYKVYDVRKMIAKSEQEIGKATAKYFFYSNIMNFFKTEITLANGEIRKRPLIETNGETGEIVWDKGRDFATVRKVLSMPQVNIVKKTEVQTGGFSKESILPKRNSDKLIARKKDWDPKKYGGFDSPTVAYSVLVVAKVEKGKSKKLKSVKELLGITIMERSSFEKNPIDFLEAKGYKEVKKDLIIKLPKYSLFELENGRKRMLASAGELQKGNELALPSKYVNFLYLASHYEKLKGSPEDNEQKQLFVEQHKHYLDEIIEQISEFSKRVILADANLDKVLSAYNKHRDKPIREQAENIIHLFTLTNLGAPAAFKYFDTTIDRKRYTSTKEVLDATLIHQSITGLYETRIDLSQLGGDSGGSSGGSSGSETPGTSESATPESSGGSSGGSSTIEVQRWEDKFEIKPGVWVYVPSVEARKVGGKILQAVRNKWIPPLYFYHLRTGGHLKAARLHLKSDFFAVVDIKQFFQSTDRERITEDLKSYFTYSQAREISTFSTVRNLSHSPHKHVLPLGFVQSPILATLCLDKSYFGSLLRRLNKHHDLKLSVFMDDVIISSNNLAQLQAAYDEALVAMRKSGYQANMSKTQAPSSKISVFNLTLSKGVMKVTSQKMSDFLIDFYSSNYEPHRIGVKNYVEAVNPGQAKLFKLSGGSKRTADGSEFEPKKKRKV

SEQ ID NO: 1323 - protein, 1696 aa, synthetic construct
MKRTADGSEFESPKKKRKVDKKYSIGLDIGTNSVGWAVITDEYKVPSKKFKVLGNTDRHSIKKNLIGALLFDSGETAEATRLKRTARRRYTRRKNRICYLQEIFSNEMAKVDDSFFHRLEESFLVEEDKKHERHPIFGNIVDEVAYHEKYPTIYHLRKKLVDSTDKADLRLIYLALAHMIKFRGHFLIEGDLNPDNSDVDKLFIQLVQTYNQLFEENPINASGVDAKAILSARLSKSRRLENLIAQLPGEKKNGLFGNLIALSLGLTPNFKSNFDLAEDAKLQLSKDTYDDDLDNLLAQIGDQYADLFLAAKNLSDAILLSDILRVNTEITKAPLSASMIKRYDEHHQDLTLLKALVRQQLPEKYKEIFFDQSKNGYAGYIDGGASQEEFYKFIKPILEKMDGTEELLVKLNREDLLRKQRTFDNGSIPHQIHLGELHAILRRQEDFYPFLKDNREKIEKILTFRIPYYVGPLARGNSRFAWMTRKSEETITPWNFEEVVDKGASAQSFIERMTNFDKNLPNEKVLPKHSLLYEYFTVYNELTKVKYVTEGMRKPAFLSGEQKKAIVDLLFKTNRKVTVKQLKEDYFKKIECFDSVEISGVEDRFNASLGTYHDLLKIIKDKDFLDNEENEDILEDIVLTLTLFEDREMIEERLKTYAHLFDDKVMKQLKRRRYTGWGRLSRKLINGIRDKQSGKTILDFLKSDGFANRNFMQLIHDDSLTFKEDIQKAQVSGQGDSLHEHIANLAGSPAIKKGILQTVKVVDELVKVMGRHKPENIVIEMARENQTTQKGQKNSRERMKRIEEGIKELGSQILKEHPVENTQLQNEKLYLYYLQNGRDMYVDQELDINRLSDYDVDAIVPQSFLKDDSIDNKVLTRSDKNRGKSDNVPSEEVVKKMKNYWRQLLNAKLITQRKFDNLTKAERGGLSELDKAGFIKRQLVETRQITKHVAQILDSRMNTKYDENDKLIREVKVITLKSKLVSDFRKDFQFYKVREINNYHHAHDAYLNAVVGTALIKKYPKLESEFVYGDYKVYDVRKMIAKSEQEIGKATAKYFFYSNIMNFFKTEITLANGEIRKRPLIETNGETGEIVWDKGRDFATVRKVLSMPQVNIVKKTEVQTGGFSKESILPKRNSDKLIARKKDWDPKKYGGFDSPTVAYSVLVVAKVEKGKSKKLKSVKELLGITIMERSSFEKNPIDFLEAKGYKEVKKDLIIKLPKYSLFELENGRKRMLASAGELQKGNELALPSKYVNFLYLASHYEKLKGSPEDNEQKQLFVEQHKHYLDEIIEQISEFSKRVILADANLDKVLSAYNKHRDKPIREQAENIIHLFTLTNLGAPAAFKYFDTTIDRKRYTSTKEVLDATLIHQSITGLYETRIDLSQLGGDSGGSSGGSSGSETPGTSESATPESSGGSSGGSSTIEVQRWEDKFEIKPGVPVYVPSVEARKVGGKILQAVRNKWIPPLYFYHLRTGGHLKAARLHLKSDFFAVVDIKQFFQSTSRSRIERDLKSYFTQSQAREISTFSTVRNLNHSPHKHVLPGGFVQSPILATLCLDKSPFGSLLRRLNKHHDLKLSVFMDDVIISSNNLAQLQAAYDEALVAMRKSGYQANMSKTQAPSSKISVFNLTLSKGVMKVTSQKMSDFLIDFYSSNYEPHRIGVKNYVEAVNPGQAKLFKLSGGSKRTADGSEFEPKKKRKV

SEQ ID NO: 1324 - protein, 1696 aa, synthetic construct
MKRTADGSEFESPKKKRKVDKKYSIGLDIGTNSVGWAVITDEYKVPSKKFKVLGNTDRHSIKKNLIGALLFDSGETAEATRLKRTARRRYTRRKNRICYLQEIFSNEMAKVDDSFFHRLEESFLVEEDKKHERHPIFGNIVDEVAYHEKYPTIYHLRKKLVDSTDKADLRLIYLALAHMIKFRGHFLIEGDLNPDNSDVDKLFIQLVQTYNQLFEENPINASGVDAKAILSARLSKSRRLENLIAQLPGEKKNGLFGNLIALSLGLTPNFKSNFDLAEDAKLQLSKDTYDDDLDNLLAQIGDQYADLFLAAKNLSDAILLSDILRVNTEITKAPLSASMIKRYDEHHQDLTLLKALVRQQLPEKYKEIFFDQSKNGYAGYIDGGASQEEFYKFIKPILEKMDGTEELLVKLNREDLLRKQRTFDNGSIPHQIHLGELHAILRRQEDFYPFLKDNREKIEKILTFRIPYYVGPLARGNSRFAWMTRKSEETITPWNFEEVVDKGASAQSFIERMTNFDKNLPNEKVLPKHSLLYEYFTVYNELTKVKYVTEGMRKPAFLSGEQKKAIVDLLFKTNRKVTVKQLKEDYFKKIECFDSVEISGVEDRFNASLGTYHDLLKIIKDKDFLDNEENEDILEDIVLTLTLFEDREMIEERLKTYAHLFDDKVMKQLKRRRYTGWGRLSRKLINGIRDKQSGKTILDFLKSDGFANRNFMQLIHDDSLTFKEDIQKAQVSGQGDSLHEHIANLAGSPAIKKGILQTVKVVDELVKVMGRHKPENIVIEMARENQTTQKGQKNSRERMKRIEEGIKELGSQILKEHPVENTQLQNEKLYLYYLQNGRDMYVDQELDINRLSDYDVDAIVPQSFLKDDSIDNKVLTRSDKNRGKSDNVPSEEVVKKMKNYWRQLLNAKLITQRKFDNLTKAERGGLSELDKAGFIKRQLVETRQITKHVAQILDSRMNTKYDENDKLIREVKVITLKSKLVSDFRKDFQFYKVREINNYHHAHDAYLNAVVGTALIKKYPKLESEFVYGDYKVYDVRKMIAKSEQEIGKATAKYFFYSNIMNFFKTEITLANGEIRKRPLIETNGETGEIVWDKGRDFATVRKVLSMPQVNIVKKTEVQTGGFSKESILPKRNSDKLIARKKDWDPKKYGGFDSPTVAYSVLVVAKVEKGKSKKLKSVKELLGITIMERSSFEKNPIDFLEAKGYKEVKKDLIIKLPKYSLFELENGRKRMLASAGELQKGNELALPSKYVNFLYLASHYEKLKGSPEDNEQKQLFVEQHKHYLDEIIEQISEFSKRVILADANLDKVLSAYNKHRDKPIREQAENIIHLFTLTNLGAPAAFKYFDTTIDRKRYTSTKEVLDATLIHQSITGLYETRIDLSQLGGDSGGSSGGSSGSETPGTSESATPESSGGSSGGSSTIEVQRWEDKFEIKPGVPVYVPSVEARKVGGKILQAVRNKWIPPLYFYHLRTGGHLKAARLHLKSDFFAVVDIKQFFQSTCRSRITQDLKSYFTPSQAREISTFSTVRNLSHSPHKHVLPFGFVQSPILATLCLDKSPFGSLLRRLNKHHDLKLSVFMDDVIISSNNLAQLQAAYDEALVAMRKSGYQANMSKTQAPSSKISVFNLTLSKGVMKVTSQKMSDFLIDFYSSNYEPHRIGVKNYVEAVNPGQAKLFKLSGGSKRTADGSEFEPKKKRKV

SEQ ID NO: 1325 - protein, 1696 aa, synthetic construct
MKRTADGSEFESPKKKRKVDKKYSIGLDIGTNSVGWAVITDEYKVPSKKFKVLGNTDRHSIKKNLIGALLFDSGETAEATRLKRTARRRYTRRKNRICYLQEIFSNEMAKVDDSFFHRLEESFLVEEDKKHERHPIFGNIVDEVAYHEKYPTIYHLRKKLVDSTDKADLRLIYLALAHMIKFRGHFLIEGDLNPDNSDVDKLFIQLVQTYNQLFEENPINASGVDAKAILSARLSKSRRLENLIAQLPGEKKNGLFGNLIALSLGLTPNFKSNFDLAEDAKLQLSKDTYDDDLDNLLAQIGDQYADLFLAAKNLSDAILLSDILRVNTEITKAPLSASMIKRYDEHHQDLTLLKALVRQQLPEKYKEIFFDQSKNGYAGYIDGGASQEEFYKFIKPILEKMDGTEELLVKLNREDLLRKQRTFDNGSIPHQIHLGELHAILRRQEDFYPFLKDNREKIEKILTFRIPYYVGPLARGNSRFAWMTRKSEETITPWNFEEVVDKGASAQSFIERMTNFDKNLPNEKVLPKHSLLYEYFTVYNELTKVKYVTEGMRKPAFLSGEQKKAIVDLLFKTNRKVTVKQLKEDYFKKIECFDSVEISGVEDRFNASLGTYHDLLKIIKDKDFLDNEENEDILEDIVLTLTLFEDREMIEERLKTYAHLFDDKVMKQLKRRRYTGWGRLSRKLINGIRDKQSGKTILDFLKSDGFANRNFMQLIHDDSLTFKEDIQKAQVSGQGDSLHEHIANLAGSPAIKKGILQTVKVVDELVKVMGRHKPENIVIEMARENQTTQKGQKNSRERMKRIEEGIKELGSQILKEHPVENTQLQNEKLYLYYLQNGRDMYVDQELDINRLSDYDVDAIVPQSFLKDDSIDNKVLTRSDKNRGKSDNVPSEEVVKKMKNYWRQLLNAKLITQRKFDNLTKAERGGLSELDKAGFIKRQLVETRQITKHVAQILDSRMNTKYDENDKLIREVKVITLKSKLVSDFRKDFQFYKVREINNYHHAHDAYLNAVVGTALIKKYPKLESEFVYGDYKVYDVRKMIAKSEQEIGKATAKYFFYSNIMNFFKTEITLANGEIRKRPLIETNGETGEIVWDKGRDFATVRKVLSMPQVNIVKKTEVQTGGFSKESILPKRNSDKLIARKKDWDPKKYGGFDSPTVAYSVLVVAKVEKGKSKKLKSVKELLGITIMERSSFEKNPIDFLEAKGYKEVKKDLIIKLPKYSLFELENGRKRMLASAGELQKGNELALPSKYVNFLYLASHYEKLKGSPEDNEQKQLFVEQHKHYLDEIIEQISEFSKRVILADANLDKVLSAYNKHRDKPIREQAENIIHLFTLTNLGAPAAFKYFDTTIDRKRYTSTKEVLDATLIHQSITGLYETRIDLSQLGGDSGGSSGGSSGSETPGTSESATPESSGGSSGGSSTIEVQRWEDKFEIKPGVPVYVPSVEARKVGGKILQAVRNKWIPPLYFYHLRTGGHLKAARLHLKSDFFAVVDIKQFFQSTDRSRIERDLKSYFTYSQAREISTFSTVRNLSHSPHKHVLPLGFVQSPILATLCLDKSYFGSLLRRLNKHHDLKLSVFMDDVIISSNNLAQLQAAYDEALVAMRKSGYQANMSKTQAPSSKISVFNLTLSKGVMKVTSQKMSDFLIDFYSSNYEPHRIGVKNYVEAVNPGQAKLFKLSGGSKRTADGSEFEPKKKRKV

SEQ ID NO: 1326 - protein, 1696 aa, synthetic construct
MKRTADGSEFESPKKKRKVDKKYSIGLDIGTNSVGWAVITDEYKVPSKKFKVLGNTDRHSIKKNLIGALLFDSGETAEATRLKRTARRRYTRRKNRICYLQEIFSNEMAKVDDSFFHRLEESFLVEEDKKHERHPIFGNIVDEVAYHEKYPTIYHLRKKLVDSTDKADLRLIYLALAHMIKFRGHFLIEGDLNPDNSDVDKLFIQLVQTYNQLFEENPINASGVDAKAILSARLSKSRRLENLIAQLPGEKKNGLFGNLIALSLGLTPNFKSNFDLAEDAKLQLSKDTYDDDLDNLLAQIGDQYADLFLAAKNLSDAILLSDILRVNTEITKAPLSASMIKRYDEHHQDLTLLKALVRQQLPEKYKEIFFDQSKNGYAGYIDGGASQEEFYKFIKPILEKMDGTEELLVKLNREDLLRKQRTFDNGSIPHQIHLGELHAILRRQEDFYPFLKDNREKIEKILTFRIPYYVGPLARGNSRFAWMTRKSEETITPWNFEEVVDKGASAQSFIERMTNFDKNLPNEKVLPKHSLLYEYFTVYNELTKVKYVTEGMRKPAFLSGEQKKAIVDLLFKTNRKVTVKQLKEDYFKKIECFDSVEISGVEDRFNASLGTYHDLLKIIKDKDFLDNEENEDILEDIVLTLTLFEDREMIEERLKTYAHLFDDKVMKQLKRRRYTGWGRLSRKLINGIRDKQSGKTILDFLKSDGFANRNFMQLIHDDSLTFKEDIQKAQVSGQGDSLHEHIANLAGSPAIKKGILQTVKVVDELVKVMGRHKPENIVIEMARENQTTQKGQKNSRERMKRIEEGIKELGSQILKEHPVENTQLQNEKLYLYYLQNGRDMYVDQELDINRLSDYDVDAIVPQSFLKDDSIDNKVLTRSDKNRGKSDNVPSEEVVKKMKNYWRQLLNAKLITQRKFDNLTKAERGGLSELDKAGFIKRQLVETRQITKHVAQILDSRMNTKYDENDKLIREVKVITLKSKLVSDFRKDFQFYKVREINNYHHAHDAYLNAVVGTALIKKYPKLESEFVYGDYKVYDVRKMIAKSEQEIGKATAKYFFYSNIMNFFKTEITLANGEIRKRPLIETNGETGEIVWDKGRDFATVRKVLSMPQVNIVKKTEVQTGGFSKESILPKRNSDKLIARKKDWDPKKYGGFDSPTVAYSVLVVAKVEKGKSKKLKSVKELLGITIMERSSFEKNPIDFLEAKGYKEVKKDLIIKLPKYSLFELENGRKRMLASAGELQKGNELALPSKYVNFLYLASHYEKLKGSPEDNEQKQLFVEQHKHYLDEIIEQISEFSKRVILADANLDKVLSAYNKHRDKPIREQAENIIHLFTLTNLGAPAAFKYFDTTIDRKRYTSTKEVLDATLIHQSITGLYETRIDLSQLGGDSGGSSGGSSGSETPGTSESATPESSGGSSGGSSTIEVQRWEDKFEIKPGVPVYVPSVEARKVGGKILQAVRNKWIPPLYFYHLRTGGHLKAARLHLKSDFFAVVDIKQFFQSTNRARITRDLKSYFEYSQAEEISTFSTVRCLNHHPHDHVLPLGFVQSPILATLCLDKSPFGSLLRRLNKHHDLKLSVFMDDVIISSNNLAQLQAAYDEALVAMRKSGYQANMSKTQAPSSKISVFNLTLSKGVMKVTSQKMSDFLIDFYSSNYEPHRIGVKNYVEAVNPGQAKLFKLSGGSKRTADGSEFEPKKKRKV

SEQ ID NO: 1327 - protein, 1696 aa, synthetic construct
MKRTADGSEFESPKKKRKVDKKYSIGLDIGTNSVGWAVITDEYKVPSKKFKVLGNTDRHSIKKNLIGALLFDSGETAEATRLKRTARRRYTRRKNRICYLQEIFSNEMAKVDDSFFHRLEESFLVEEDKKHERHPIFGNIVDEVAYHEKYPTIYHLRKKLVDSTDKADLRLIYLALAHMIKFRGHFLIEGDLNPDNSDVDKLFIQLVQTYNQLFEENPINASGVDAKAILSARLSKSRRLENLIAQLPGEKKNGLFGNLIALSLGLTPNFKSNFDLAEDAKLQLSKDTYDDDLDNLLAQIGDQYADLFLAAKNLSDAILLSDILRVNTEITKAPLSASMIKRYDEHHQDLTLLKALVRQQLPEKYKEIFFDQSKNGYAGYIDGGASQEEFYKFIKPILEKMDGTEELLVKLNREDLLRKQRTFDNGSIPHQIHLGELHAILRRQEDFYPFLKDNREKIEKILTFRIPYYVGPLARGNSRFAWMTRKSEETITPWNFEEVVDKGASAQSFIERMTNFDKNLPNEKVLPKHSLLYEYFTVYNELTKVKYVTEGMRKPAFLSGEQKKAIVDLLFKTNRKVTVKQLKEDYFKKIECFDSVEISGVEDRFNASLGTYHDLLKIIKDKDFLDNEENEDILEDIVLTLTLFEDREMIEERLKTYAHLFDDKVMKQLKRRRYTGWGRLSRKLINGIRDKQSGKTILDFLKSDGFANRNFMQLIHDDSLTFKEDIQKAQVSGQGDSLHEHIANLAGSPAIKKGILQTVKVVDELVKVMGRHKPENIVIEMARENQTTQKGQKNSRERMKRIEEGIKELGSQILKEHPVENTQLQNEKLYLYYLQNGRDMYVDQELDINRLSDYDVDAIVPQSFLKDDSIDNKVLTRSDKNRGKSDNVPSEEVVKKMKNYWRQLLNAKLITQRKFDNLTKAERGGLSELDKAGFIKRQLVETRQITKHVAQILDSRMNTKYDENDKLIREVKVITLKSKLVSDFRKDFQFYKVREINNYHHAHDAYLNAVVGTALIKKYPKLESEFVYGDYKVYDVRKMIAKSEQEIGKATAKYFFYSNIMNFFKTEITLANGEIRKRPLIETNGETGEIVWDKGRDFATVRKVLSMPQVNIVKKTEVQTGGFSKESILPKRNSDKLIARKKDWDPKKYGGFDSPTVAYSVLVVAKVEKGKSKKLKSVKELLGITIMERSSFEKNPIDFLEAKGYKEVKKDLIIKLPKYSLFELENGRKRMLASAGELQKGNELALPSKYVNFLYLASHYEKLKGSPEDNEQKQLFVEQHKHYLDEIIEQISEFSKRVILADANLDKVLSAYNKHRDKPIREQAENIIHLFTLTNLGAPAAFKYFDTTIDRKRYTSTKEVLDATLIHQSITGLYETRIDLSQLGGDSGGSSGGSSGSETPGTSESATPESSGGSSGGSSTIEVQRWEDKFEIKPGVWVYVPSVEARKVGGKILQAVRNKWIPPLYFYHLRTGGHLKAARLHLKSDFFAVVDIKQFFQSTSRERITRDLKSYFTESQAREISTFSTVRCLSHSPHKHVLPLGFVQSPILATLCLDKSYFGSLLRRLNKHHDLKLSVFMDDVIISSNNLAQLQAAYDEALVAMRKSGYQANMSKTQAPSSKISVFNLTLSKGVMKVTSQKMSDFLNDFYSSNYEPHRIGVKNYVEAVNPGQAKLFKLSGGSKRTADGSEFEPKKKRKV

SEQ ID NO: 1328 - protein, 1696 aa, synthetic construct
MKRTADGSEFESPKKKRKVDKKYSIGLDIGTNSVGWAVITDEYKVPSKKFKVLGNTDRHSIKKNLIGALLFDSGETAEATRLKRTARRRYTRRKNRICYLQEIFSNEMAKVDDSFFHRLEESFLVEEDKKHERHPIFGNIVDEVAYHEKYPTIYHLRKKLVDSTDKADLRLIYLALAHMIKFRGHFLIEGDLNPDNSDVDKLFIQLVQTYNQLFEENPINASGVDAKAILSARLSKSRRLENLIAQLPGEKKNGLFGNLIALSLGLTPNFKSNFDLAEDAKLQLSKDTYDDDLDNLLAQIGDQYADLFLAAKNLSDAILLSDILRVNTEITKAPLSASMIKRYDEHHQDLTLLKALVRQQLPEKYKEIFFDQSKNGYAGYIDGGASQEEFYKFIKPILEKMDGTEELLVKLNREDLLRKQRTFDNGSIPHQIHLGELHAILRRQEDFYPFLKDNREKIEKILTFRIPYYVGPLARGNSRFAWMTRKSEETITPWNFEEVVDKGASAQSFIERMTNFDKNLPNEKVLPKHSLLYEYFTVYNELTKVKYVTEGMRKPAFLSGEQKKAIVDLLFKTNRKVTVKQLKEDYFKKIECFDSVEISGVEDRFNASLGTYHDLLKIIKDKDFLDNEENEDILEDIVLTLTLFEDREMIEERLKTYAHLFDDKVMKQLKRRRYTGWGRLSRKLINGIRDKQSGKTILDFLKSDGFANRNFMQLIHDDSLTFKEDIQKAQVSGQGDSLHEHIANLAGSPAIKKGILQTVKVVDELVKVMGRHKPENIVIEMARENQTTQKGQKNSRERMKRIEEGIKELGSQILKEHPVENTQLQNEKLYLYYLQNGRDMYVDQELDINRLSDYDVDAIVPQSFLKDDSIDNKVLTRSDKNRGKSDNVPSEEVVKKMKNYWRQLLNAKLITQRKFDNLTKAERGGLSELDKAGFIKRQLVETRQITKHVAQILDSRMNTKYDENDKLIREVKVITLKSKLVSDFRKDFQFYKVREINNYHHAHDAYLNAVVGTALIKKYPKLESEFVYGDYKVYDVRKMIAKSEQEIGKATAKYFFYSNIMNFFKTEITLANGEIRKRPLIETNGETGEIVWDKGRDFATVRKVLSMPQVNIVKKTEVQTGGFSKESILPKRNSDKLIARKKDWDPKKYGGFDSPTVAYSVLVVAKVEKGKSKKLKSVKELLGITIMERSSFEKNPIDFLEAKGYKEVKKDLIIKLPKYSLFELENGRKRMLASAGELQKGNELALPSKYVNFLYLASHYEKLKGSPEDNEQKQLFVEQHKHYLDEIIEQISEFSKRVILADANLDKVLSAYNKHRDKPIREQAENIIHLFTLTNLGAPAAFKYFDTTIDRKRYTSTKEVLDATLIHQSITGLYETRIDLSQLGGDSGGSSGGSSGSETPGTSESATPESSGGSSGGSSTIEVQRWEDKFEIKPGVWVYVPSVEARKVGGKILQAVRNKWIPPLYFYHLRTGGHLKAARLHLKSDFFAVVDIKQFFQSTSRSRIERDLKSYFTPSQAREISTFSTVRNLNHSPHKHVLPGGFVQSPILATLCLDKSPFGSLLRRLNKHHDLKLSVFMDDVIISSNNLAQLQAAYDEALVAMRKSGYQANMSKTQAPSSKISVFNLTLSKGVMKVTSQKMSDFLNDFYSSNYEPHRIGVKNYVEAVNPGQAKLFKLSGGSKRTADGSEFEPKKKRKV

SEQ ID NO: 1329 - protein, 1696 aa, synthetic construct
MKRTADGSEFESPKKKRKVDKKYSIGLDIGTNSVGWAVITDEYKVPSKKFKVLGNTDRHSIKKNLIGALLFDSGETAEATRLKRTARRRYTRRKNRICYLQEIFSNEMAKVDDSFFHRLEESFLVEEDKKHERHPIFGNIVDEVAYHEKYPTIYHLRKKLVDSTDKADLRLIYLALAHMIKFRGHFLIEGDLNPDNSDVDKLFIQLVQTYNQLFEENPINASGVDAKAILSARLSKSRRLENLIAQLPGEKKNGLFGNLIALSLGLTPNFKSNFDLAEDAKLQLSKDTYDDDLDNLLAQIGDQYADLFLAAKNLSDAILLSDILRVNTEITKAPLSASMIKRYDEHHQDLTLLKALVRQQLPEKYKEIFFDQSKNGYAGYIDGGASQEEFYKFIKPILEKMDGTEELLVKLNREDLLRKQRTFDNGSIPHQIHLGELHAILRRQEDFYPFLKDNREKIEKILTFRIPYYVGPLARGNSRFAWMTRKSEETITPWNFEEVVDKGASAQSFIERMTNFDKNLPNEKVLPKHSLLYEYFTVYNELTKVKYVTEGMRKPAFLSGEQKKAIVDLLFKTNRKVTVKQLKEDYFKKIECFDSVEISGVEDRFNASLGTYHDLLKIIKDKDFLDNEENEDILEDIVLTLTLFEDREMIEERLKTYAHLFDDKVMKQLKRRRYTGWGRLSRKLINGIRDKQSGKTILDFLKSDGFANRNFMQLIHDDSLTFKEDIQKAQVSGQGDSLHEHIANLAGSPAIKKGILQTVKVVDELVKVMGRHKPENIVIEMARENQTTQKGQKNSRERMKRIEEGIKELGSQILKEHPVENTQLQNEKLYLYYLQNGRDMYVDQELDINRLSDYDVDAIVPQSFLKDDSIDNKVLTRSDKNRGKSDNVPSEEVVKKMKNYWRQLLNAKLITQRKFDNLTKAERGGLSELDKAGFIKRQLVETRQITKHVAQILDSRMNTKYDENDKLIREVKVITLKSKLVSDFRKDFQFYKVREINNYHHAHDAYLNAVVGTALIKKYPKLESEFVYGDYKVYDVRKMIAKSEQEIGKATAKYFFYSNIMNFFKTEITLANGEIRKRPLIETNGETGEIVWDKGRDFATVRKVLSMPQVNIVKKTEVQTGGFSKESILPKRNSDKLIARKKDWDPKKYGGFDSPTVAYSVLVVAKVEKGKSKKLKSVKELLGITIMERSSFEKNPIDFLEAKGYKEVKKDLIIKLPKYSLFELENGRKRMLASAGELQKGNELALPSKYVNFLYLASHYEKLKGSPEDNEQKQLFVEQHKHYLDEIIEQISEFSKRVILADANLDKVLSAYNKHRDKPIREQAENIIHLFTLTNLGAPAAFKYFDTTIDRKRYTSTKEVLDATLIHQSITGLYETRIDLSQLGGDSGGSSGGSSGSETPGTSESATPESSGGSSGGSSTIEVQRWERKFEIKPGVWVYVPSVEARKVGTKILQAVRNKWIPPLYFYHLRTGGHLKAARLHLKSDFFAVVDIKQFFQSTSRQRITRDLKSYFTYSQAREISTFSTVRNLSHSPHKHGLPFGFVQSPILATLCLDKSYFGSLLRRLNKHHDLKLSVFMDDVIISSNNLAQLQAAYDEALVAMRKSGYQANMSKTQAPSSKISVFNLTLSKGVMKVTSQKMSDFLIDFYSSNYEPHRIGVKNYVEAVNPGQAKLFKLSGGSKRTADGSEFEPKKKRKV

SEQ ID NO: 1330 - protein, 1696 aa, synthetic construct
MKRTADGSEFESPKKKRKVDKKYSIGLDIGTNSVGWAVITDEYKVPSKKFKVLGNTDRHSIKKNLIGALLFDSGETAEATRLKRTARRRYTRRKNRICYLQEIFSNEMAKVDDSFFHRLEESFLVEEDKKHERHPIFGNIVDEVAYHEKYPTIYHLRKKLVDSTDKADLRLIYLALAHMIKFRGHFLIEGDLNPDNSDVDKLFIQLVQTYNQLFEENPINASGVDAKAILSARLSKSRRLENLIAQLPGEKKNGLFGNLIALSLGLTPNFKSNFDLAEDAKLQLSKDTYDDDLDNLLAQIGDQYADLFLAAKNLSDAILLSDILRVNTEITKAPLSASMIKRYDEHHQDLTLLKALVRQQLPEKYKEIFFDQSKNGYAGYIDGGASQEEFYKFIKPILEKMDGTEELLVKLNREDLLRKQRTFDNGSIPHQIHLGELHAILRRQEDFYPFLKDNREKIEKILTFRIPYYVGPLARGNSRFAWMTRKSEETITPWNFEEVVDKGASAQSFIERMTNFDKNLPNEKVLPKHSLLYEYFTVYNELTKVKYVTEGMRKPAFLSGEQKKAIVDLLFKTNRKVTVKQLKEDYFKKIECFDSVEISGVEDRFNASLGTYHDLLKIIKDKDFLDNEENEDILEDIVLTLTLFEDREMIEERLKTYAHLFDDKVMKQLKRRRYTGWGRLSRKLINGIRDKQSGKTILDFLKSDGFANRNFMQLIHDDSLTFKEDIQKAQVSGQGDSLHEHIANLAGSPAIKKGILQTVKVVDELVKVMGRHKPENIVIEMARENQTTQKGQKNSRERMKRIEEGIKELGSQILKEHPVENTQLQNEKLYLYYLQNGRDMYVDQELDINRLSDYDVDAIVPQSFLKDDSIDNKVLTRSDKNRGKSDNVPSEEVVKKMKNYWRQLLNAKLITQRKFDNLTKAERGGLSELDKAGFIKRQLVETRQITKHVAQILDSRMNTKYDENDKLIREVKVITLKSKLVSDFRKDFQFYKVREINNYHHAHDAYLNAVVGTALIKKYPKLESEFVYGDYKVYDVRKMIAKSEQEIGKATAKYFFYSNIMNFFKTEITLANGEIRKRPLIETNGETGEIVWDKGRDFATVRKVLSMPQVNIVKKTEVQTGGFSKESILPKRNSDKLIARKKDWDPKKYGGFDSPTVAYSVLVVAKVEKGKSKKLKSVKELLGITIMERSSFEKNPIDFLEAKGYKEVKKDLIIKLPKYSLFELENGRKRMLASAGELQKGNELALPSKYVNFLYLASHYEKLKGSPEDNEQKQLFVEQHKHYLDEIIEQISEFSKRVILADANLDKVLSAYNKHRDKPIREQAENIIHLFTLTNLGAPAAFKYFDTTIDRKRYTSTKEVLDATLIHQSITGLYETRIDLSQLGGDSGGSSGGSSGSETPGTSESATPESSGGSSGGSSTIEVQRWEDKFEIKPGVWVYVPSVEARKVGGKILQAVRNKWIPPLYFYHLRTGGHLKAARLHLKSDFFAVVDIKQFFQSTSRSRITQDLLSYFKESQAREISTFSTVRNLSHSPHKHVLPLGFVQSPILATLCLDKSPFGSLLRRLNKHHDLKLSVFMDDVIISSNNLAQLQAAYDEALVAMRKSGYQANMSKTQAPSSKISVFNLTLSKGVMKVTSQKMSDFLNDFYSSNYEPHRIGVKNYVEAVNPGQAKLFKLSGGSKRTADGSEFEPKKKRKV

SEQ ID NO: 1331 - protein, 1696 aa, synthetic construct
MKRTADGSEFESPKKKRKVDKKYSIGLDIGTNSVGWAVITDEYKVPSKKFKVLGNTDRHSIKKNLIGALLFDSGETAEATRLKRTARRRYTRRKNRICYLQEIFSNEMAKVDDSFFHRLEESFLVEEDKKHERHPIFGNIVDEVAYHEKYPTIYHLRKKLVDSTDKADLRLIYLALAHMIKFRGHFLIEGDLNPDNSDVDKLFIQLVQTYNQLFEENPINASGVDAKAILSARLSKSRRLENLIAQLPGEKKNGLFGNLIALSLGLTPNFKSNFDLAEDAKLQLSKDTYDDDLDNLLAQIGDQYADLFLAAKNLSDAILLSDILRVNTEITKAPLSASMIKRYDEHHQDLTLLKALVRQQLPEKYKEIFFDQSKNGYAGYIDGGASQEEFYKFIKPILEKMDGTEELLVKLNREDLLRKQRTFDNGSIPHQIHLGELHAILRRQEDFYPFLKDNREKIEKILTFRIPYYVGPLARGNSRFAWMTRKSEETITPWNFEEVVDKGASAQSFIERMTNFDKNLPNEKVLPKHSLLYEYFTVYNELTKVKYVTEGMRKPAFLSGEQKKAIVDLLFKTNRKVTVKQLKEDYFKKIECFDSVEISGVEDRFNASLGTYHDLLKIIKDKDFLDNEENEDILEDIVLTLTLFEDREMIEERLKTYAHLFDDKVMKQLKRRRYTGWGRLSRKLINGIRDKQSGKTILDFLKSDGFANRNFMQLIHDDSLTFKEDIQKAQVSGQGDSLHEHIANLAGSPAIKKGILQTVKVVDELVKVMGRHKPENIVIEMARENQTTQKGQKNSRERMKRIEEGIKELGSQILKEHPVENTQLQNEKLYLYYLQNGRDMYVDQELDINRLSDYDVDAIVPQSFLKDDSIDNKVLTRSDKNRGKSDNVPSEEVVKKMKNYWRQLLNAKLITQRKFDNLTKAERGGLSELDKAGFIKRQLVETRQITKHVAQILDSRMNTKYDENDKLIREVKVITLKSKLVSDFRKDFQFYKVREINNYHHAHDAYLNAVVGTALIKKYPKLESEFVYGDYKVYDVRKMIAKSEQEIGKATAKYFFYSNIMNFFKTEITLANGEIRKRPLIETNGETGEIVWDKGRDFATVRKVLSMPQVNIVKKTEVQTGGFSKESILPKRNSDKLIARKKDWDPKKYGGFDSPTVAYSVLVVAKVEKGKSKKLKSVKELLGITIMERSSFEKNPIDFLEAKGYKEVKKDLIIKLPKYSLFELENGRKRMLASAGELQKGNELALPSKYVNFLYLASHYEKLKGSPEDNEQKQLFVEQHKHYLDEIIEQISEFSKRVILADANLDKVLSAYNKHRDKPIREQAENIIHLFTLTNLGAPAAFKYFDTTIDRKRYTSTKEVLDATLIHQSITGLYETRIDLSQLGGDSGGSSGGSSGSETPGTSESATPESSGGSSGGSSTIEVQRWEDKFEIKPGVWVYVPSVEARKVGGKILQAVRNKWIPPLYFYHLRTGGHLKAARLHLKSDFFAVVDIKQFFQSTNRSRITRDLKSYFTYSQAREISTFSTVRNLSHSPHDHVLPLGFVQSPILATLCLDKSPFGSLLRRLNKHHDLKLSVFMDDVIISSNNLAQLQAAYDEALVAMRKSGYQANMSKTQAPSSKISVFNLTLSKGVMKVTSQKMSDFLNDFYSSNYEPHRIGVKNYVEAVNPGQAKLFKLSGGSKRTADGSEFEPKKKRKV

SEQ ID NO: 1332 - protein, 1696 aa, synthetic construct
MKRTADGSEFESPKKKRKVDKKYSIGLDIGTNSVGWAVITDEYKVPSKKFKVLGNTDRHSIKKNLIGALLFDSGETAEATRLKRTARRRYTRRKNRICYLQEIFSNEMAKVDDSFFHRLEESFLVEEDKKHERHPIFGNIVDEVAYHEKYPTIYHLRKKLVDSTDKADLRLIYLALAHMIKFRGHFLIEGDLNPDNSDVDKLFIQLVQTYNQLFEENPINASGVDAKAILSARLSKSRRLENLIAQLPGEKKNGLFGNLIALSLGLTPNFKSNFDLAEDAKLQLSKDTYDDDLDNLLAQIGDQYADLFLAAKNLSDAILLSDILRVNTEITKAPLSASMIKRYDEHHQDLTLLKALVRQQLPEKYKEIFFDQSKNGYAGYIDGGASQEEFYKFIKPILEKMDGTEELLVKLNREDLLRKQRTFDNGSIPHQIHLGELHAILRRQEDFYPFLKDNREKIEKILTFRIPYYVGPLARGNSRFAWMTRKSEETITPWNFEEVVDKGASAQSFIERMTNFDKNLPNEKVLPKHSLLYEYFTVYNELTKVKYVTEGMRKPAFLSGEQKKAIVDLLFKTNRKVTVKQLKEDYFKKIECFDSVEISGVEDRFNASLGTYHDLLKIIKDKDFLDNEENEDILEDIVLTLTLFEDREMIEERLKTYAHLFDDKVMKQLKRRRYTGWGRLSRKLINGIRDKQSGKTILDFLKSDGFANRNFMQLIHDDSLTFKEDIQKAQVSGQGDSLHEHIANLAGSPAIKKGILQTVKVVDELVKVMGRHKPENIVIEMARENQTTQKGQKNSRERMKRIEEGIKELGSQILKEHPVENTQLQNEKLYLYYLQNGRDMYVDQELDINRLSDYDVDAIVPQSFLKDDSIDNKVLTRSDKNRGKSDNVPSEEVVKKMKNYWRQLLNAKLITQRKFDNLTKAERGGLSELDKAGFIKRQLVETRQITKHVAQILDSRMNTKYDENDKLIREVKVITLKSKLVSDFRKDFQFYKVREINNYHHAHDAYLNAVVGTALIKKYPKLESEFVYGDYKVYDVRKMIAKSEQEIGKATAKYFFYSNIMNFFKTEITLANGEIRKRPLIETNGETGEIVWDKGRDFATVRKVLSMPQVNIVKKTEVQTGGFSKESILPKRNSDKLIARKKDWDPKKYGGFDSPTVAYSVLVVAKVEKGKSKKLKSVKELLGITIMERSSFEKNPIDFLEAKGYKEVKKDLIIKLPKYSLFELENGRKRMLASAGELQKGNELALPSKYVNFLYLASHYEKLKGSPEDNEQKQLFVEQHKHYLDEIIEQISEFSKRVILADANLDKVLSAYNKHRDKPIREQAENIIHLFTLTNLGAPAAFKYFDTTIDRKRYTSTKEVLDATLIHQSITGLYETRIDLSQLGGDSGGSSGGSSGSETPGTSESATPESSGGSSGGSSTIEVQRWEDKFEIKPGVWVYVPSVEARKVGGKILQAVRNKWIPPLYFYHLRTGGHLKAARLHLKSDFFAVVDIKQFFQSTSRSMITRDLKSYFTPSQAREISTFSTVRNLSHSPHKHVLPFGFVQSPILATLCLDKSPYGSLLRRLNKHHDLKLSVFMDDVIISSNNLAQLQAAYDEALVAMRKSGYQANMSKTQAPSSKISVFNLTLSKGVMKVTSQKMSDFLIDFNSSNYEPHRIGVKNYVEAVNPGQAKLFKLSGGSKRTADGSEFEPKKKRKV

SEQ ID NO: 1333 - protein, 1696 aa, synthetic construct
MKRTADGSEFESPKKKRKVDKKYSIGLDIGTNSVGWAVITDEYKVPSKKFKVLGNTDRHSIKKNLIGALLFDSGETAEATRLKRTARRRYTRRKNRICYLQEIFSNEMAKVDDSFFHRLEESFLVEEDKKHERHPIFGNIVDEVAYHEKYPTIYHLRKKLVDSTDKADLRLIYLALAHMIKFRGHFLIEGDLNPDNSDVDKLFIQLVQTYNQLFEENPINASGVDAKAILSARLSKSRRLENLIAQLPGEKKNGLFGNLIALSLGLTPNFKSNFDLAEDAKLQLSKDTYDDDLDNLLAQIGDQYADLFLAAKNLSDAILLSDILRVNTEITKAPLSASMIKRYDEHHQDLTLLKALVRQQLPEKYKEIFFDQSKNGYAGYIDGGASQEEFYKFIKPILEKMDGTEELLVKLNREDLLRKQRTFDNGSIPHQIHLGELHAILRRQEDFYPFLKDNREKIEKILTFRIPYYVGPLARGNSRFAWMTRKSEETITPWNFEEVVDKGASAQSFIERMTNFDKNLPNEKVLPKHSLLYEYFTVYNELTKVKYVTEGMRKPAFLSGEQKKAIVDLLFKTNRKVTVKQLKEDYFKKIECFDSVEISGVEDRFNASLGTYHDLLKIIKDKDFLDNEENEDILEDIVLTLTLFEDREMIEERLKTYAHLFDDKVMKQLKRRRYTGWGRLSRKLINGIRDKQSGKTILDFLKSDGFANRNFMQLIHDDSLTFKEDIQKAQVSGQGDSLHEHIANLAGSPAIKKGILQTVKVVDELVKVMGRHKPENIVIEMARENQTTQKGQKNSRERMKRIEEGIKELGSQILKEHPVENTQLQNEKLYLYYLQNGRDMYVDQELDINRLSDYDVDAIVPQSFLKDDSIDNKVLTRSDKNRGKSDNVPSEEVVKKMKNYWRQLLNAKLITQRKFDNLTKAERGGLSELDKAGFIKRQLVETRQITKHVAQILDSRMNTKYDENDKLIREVKVITLKSKLVSDFRKDFQFYKVREINNYHHAHDAYLNAVVGTALIKKYPKLESEFVYGDYKVYDVRKMIAKSEQEIGKATAKYFFYSNIMNFFKTEITLANGEIRKRPLIETNGETGEIVWDKGRDFATVRKVLSMPQVNIVKKTEVQTGGFSKESILPKRNSDKLIARKKDWDPKKYGGFDSPTVAYSVLVVAKVEKGKSKKLKSVKELLGITIMERSSFEKNPIDFLEAKGYKEVKKDLIIKLPKYSLFELENGRKRMLASAGELQKGNELALPSKYVNFLYLASHYEKLKGSPEDNEQKQLFVEQHKHYLDEIIEQISEFSKRVILADANLDKVLSAYNKHRDKPIREQAENIIHLFTLTNLGAPAAFKYFDTTIDRKRYTSTKEVLDATLIHQSITGLYETRIDLSQLGGDSGGSSGGSSGSETPGTSESATPESSGGSSGGSSTIEVQRWEDKFEIKPGVWVYVPSVEARKVGGKILQAVRNKWIPPLYFYHLRTGGHLKAARLHLKSDFFAVVDIKQFFQSTSRSLITRDLLSYFKYSQAREISTFSTVRNLSHSPHKHVLPLGFVQSPILATLCLDKSYFGSLLRRLNKHHDLKLSVFMDDVIISSNNLAQLQAAYDEALVAMRKSGYQANMSKTQAPSSKISVFNLTLSKGVMKVTSQKMSDFLIDFNSSNYEPHRIGVKNYVEAVNPGQAKLFKLSGGSKRTADGSEFEPKKKRKV

SEQ ID NO: 1334 - protein, 1696 aa, synthetic construct
MKRTADGSEFESPKKKRKVDKKYSIGLDIGTNSVGWAVITDEYKVPSKKFKVLGNTDRHSIKKNLIGALLFDSGETAEATRLKRTARRRYTRRKNRICYLQEIFSNEMAKVDDSFFHRLEESFLVEEDKKHERHPIFGNIVDEVAYHEKYPTIYHLRKKLVDSTDKADLRLIYLALAHMIKFRGHFLIEGDLNPDNSDVDKLFIQLVQTYNQLFEENPINASGVDAKAILSARLSKSRRLENLIAQLPGEKKNGLFGNLIALSLGLTPNFKSNFDLAEDAKLQLSKDTYDDDLDNLLAQIGDQYADLFLAAKNLSDAILLSDILRVNTEITKAPLSASMIKRYDEHHQDLTLLKALVRQQLPEKYKEIFFDQSKNGYAGYIDGGASQEEFYKFIKPILEKMDGTEELLVKLNREDLLRKQRTFDNGSIPHQIHLGELHAILRRQEDFYPFLKDNREKIEKILTFRIPYYVGPLARGNSRFAWMTRKSEETITPWNFEEVVDKGASAQSFIERMTNFDKNLPNEKVLPKHSLLYEYFTVYNELTKVKYVTEGMRKPAFLSGEQKKAIVDLLFKTNRKVTVKQLKEDYFKKIECFDSVEISGVEDRFNASLGTYHDLLKIIKDKDFLDNEENEDILEDIVLTLTLFEDREMIEERLKTYAHLFDDKVMKQLKRRRYTGWGRLSRKLINGIRDKQSGKTILDFLKSDGFANRNFMQLIHDDSLTFKEDIQKAQVSGQGDSLHEHIANLAGSPAIKKGILQTVKVVDELVKVMGRHKPENIVIEMARENQTTQKGQKNSRERMKRIEEGIKELGSQILKEHPVENTQLQNEKLYLYYLQNGRDMYVDQELDINRLSDYDVDAIVPQSFLKDDSIDNKVLTRSDKNRGKSDNVPSEEVVKKMKNYWRQLLNAKLITQRKFDNLTKAERGGLSELDKAGFIKRQLVETRQITKHVAQILDSRMNTKYDENDKLIREVKVITLKSKLVSDFRKDFQFYKVREINNYHHAHDAYLNAVVGTALIKKYPKLESEFVYGDYKVYDVRKMIAKSEQEIGKATAKYFFYSNIMNFFKTEITLANGEIRKRPLIETNGETGEIVWDKGRDFATVRKVLSMPQVNIVKKTEVQTGGFSKESILPKRNSDKLIARKKDWDPKKYGGFDSPTVAYSVLVVAKVEKGKSKKLKSVKELLGITIMERSSFEKNPIDFLEAKGYKEVKKDLIIKLPKYSLFELENGRKRMLASAGELQKGNELALPSKYVNFLYLASHYEKLKGSPEDNEQKQLFVEQHKHYLDEIIEQISEFSKRVILADANLDKVLSAYNKHRDKPIREQAENIIHLFTLTNLGAPAAFKYFDTTIDRKRYTSTKEVLDATLIHQSITGLYETRIDLSQLGGDSGGSSGGSSGSETPGTSESATPESSGGSSGGSSTIEVQRWEDKFEIKPGVWVYVPSVEARKVGGKILQAVRNKWIPPLYFYHLRTGGHLKAARLHLKSDFFAVVDIKQFFQSTSRDMITRDLLSYFKYSQAREISTFSTVRNLSHSPHKHVLPLGFVQSPILATLCLDKSYFGSLLRRLNKHHDLKLSVFMDDVIISSNNLAQLQAAYDEALVAMRKSGYQANMSKTQAPSSKISVFNLTLSKGVMKVTSQKMSDFLIDFYSSNYEPHRIGVKNYVEAVNPGQAKLFKLSGGSKRTADGSEFEPKKKRKV

SEQ ID NO: 1335 - protein, 1696 aa, synthetic construct
MKRTADGSEFESPKKKRKVDKKYSIGLDIGTNSVGWAVITDEYKVPSKKFKVLGNTDRHSIKKNLIGALLFDSGETAEATRLKRTARRRYTRRKNRICYLQEIFSNEMAKVDDSFFHRLEESFLVEEDKKHERHPIFGNIVDEVAYHEKYPTIYHLRKKLVDSTDKADLRLIYLALAHMIKFRGHFLIEGDLNPDNSDVDKLFIQLVQTYNQLFEENPINASGVDAKAILSARLSKSRRLENLIAQLPGEKKNGLFGNLIALSLGLTPNFKSNFDLAEDAKLQLSKDTYDDDLDNLLAQIGDQYADLFLAAKNLSDAILLSDILRVNTEITKAPLSASMIKRYDEHHQDLTLLKALVRQQLPEKYKEIFFDQSKNGYAGYIDGGASQEEFYKFIKPILEKMDGTEELLVKLNREDLLRKQRTFDNGSIPHQIHLGELHAILRRQEDFYPFLKDNREKIEKILTFRIPYYVGPLARGNSRFAWMTRKSEETITPWNFEEVVDKGASAQSFIERMTNFDKNLPNEKVLPKHSLLYEYFTVYNELTKVKYVTEGMRKPAFLSGEQKKAIVDLLFKTNRKVTVKQLKEDYFKKIECFDSVEISGVEDRFNASLGTYHDLLKIIKDKDFLDNEENEDILEDIVLTLTLFEDREMIEERLKTYAHLFDDKVMKQLKRRRYTGWGRLSRKLINGIRDKQSGKTILDFLKSDGFANRNFMQLIHDDSLTFKEDIQKAQVSGQGDSLHEHIANLAGSPAIKKGILQTVKVVDELVKVMGRHKPENIVIEMARENQTTQKGQKNSRERMKRIEEGIKELGSQILKEHPVENTQLQNEKLYLYYLQNGRDMYVDQELDINRLSDYDVDAIVPQSFLKDDSIDNKVLTRSDKNRGKSDNVPSEEVVKKMKNYWRQLLNAKLITQRKFDNLTKAERGGLSELDKAGFIKRQLVETRQITKHVAQILDSRMNTKYDENDKLIREVKVITLKSKLVSDFRKDFQFYKVREINNYHHAHDAYLNAVVGTALIKKYPKLESEFVYGDYKVYDVRKMIAKSEQEIGKATAKYFFYSNIMNFFKTEITLANGEIRKRPLIETNGETGEIVWDKGRDFATVRKVLSMPQVNIVKKTEVQTGGFSKESILPKRNSDKLIARKKDWDPKKYGGFDSPTVAYSVLVVAKVEKGKSKKLKSVKELLGITIMERSSFEKNPIDFLEAKGYKEVKKDLIIKLPKYSLFELENGRKRMLASAGELQKGNELALPSKYVNFLYLASHYEKLKGSPEDNEQKQLFVEQHKHYLDEIIEQISEFSKRVILADANLDKVLSAYNKHRDKPIREQAENIIHLFTLTNLGAPAAFKYFDTTIDRKRYTSTKEVLDATLIHQSITGLYETRIDLSQLGGDSGGSSGGSSGSETPGTSESATPESSGGSSGGSSTIEVQRWEDKFEIKPGVWVYVPSVEARKVGGKILQAVRNKWIPPLYFYHLRTGGHLKAARLHLKSDFFAVVDIKQFFQSTSRSRITRDLKSYFTYSQAREISTFSTVRNLSHSPHDHVLPLGFVQSPILATLCLDKSPFGSLLRRLNKHHDLKLSVFMDDVIISSNNLAQLQAAYDEALVAMRKSGYQANMSKTQAPSSKISVFNLTLSKGVMKVTSQKMSDFLIDFNSSNYEPHRIGVKNYVEAVNPGQAKLFKLSGGSKRTADGSEFEPKKKRKV

SEQ ID NO: 1336 - protein, 1696 aa, synthetic construct
MKRTADGSEFESPKKKRKVDKKYSIGLDIGTNSVGWAVITDEYKVPSKKFKVLGNTDRHSIKKNLIGALLFDSGETAEATRLKRTARRRYTRRKNRICYLQEIFSNEMAKVDDSFFHRLEESFLVEEDKKHERHPIFGNIVDEVAYHEKYPTIYHLRKKLVDSTDKADLRLIYLALAHMIKFRGHFLIEGDLNPDNSDVDKLFIQLVQTYNQLFEENPINASGVDAKAILSARLSKSRRLENLIAQLPGEKKNGLFGNLIALSLGLTPNFKSNFDLAEDAKLQLSKDTYDDDLDNLLAQIGDQYADLFLAAKNLSDAILLSDILRVNTEITKAPLSASMIKRYDEHHQDLTLLKALVRQQLPEKYKEIFFDQSKNGYAGYIDGGASQEEFYKFIKPILEKMDGTEELLVKLNREDLLRKQRTFDNGSIPHQIHLGELHAILRRQEDFYPFLKDNREKIEKILTFRIPYYVGPLARGNSRFAWMTRKSEETITPWNFEEVVDKGASAQSFIERMTNFDKNLPNEKVLPKHSLLYEYFTVYNELTKVKYVTEGMRKPAFLSGEQKKAIVDLLFKTNRKVTVKQLKEDYFKKIECFDSVEISGVEDRFNASLGTYHDLLKIIKDKDFLDNEENEDILEDIVLTLTLFEDREMIEERLKTYAHLFDDKVMKQLKRRRYTGWGRLSRKLINGIRDKQSGKTILDFLKSDGFANRNFMQLIHDDSLTFKEDIQKAQVSGQGDSLHEHIANLAGSPAIKKGILQTVKVVDELVKVMGRHKPENIVIEMARENQTTQKGQKNSRERMKRIEEGIKELGSQILKEHPVENTQLQNEKLYLYYLQNGRDMYVDQELDINRLSDYDVDAIVPQSFLKDDSIDNKVLTRSDKNRGKSDNVPSEEVVKKMKNYWRQLLNAKLITQRKFDNLTKAERGGLSELDKAGFIKRQLVETRQITKHVAQILDSRMNTKYDENDKLIREVKVITLKSKLVSDFRKDFQFYKVREINNYHHAHDAYLNAVVGTALIKKYPKLESEFVYGDYKVYDVRKMIAKSEQEIGKATAKYFFYSNIMNFFKTEITLANGEIRKRPLIETNGETGEIVWDKGRDFATVRKVLSMPQVNIVKKTEVQTGGFSKESILPKRNSDKLIARKKDWDPKKYGGFDSPTVAYSVLVVAKVEKGKSKKLKSVKELLGITIMERSSFEKNPIDFLEAKGYKEVKKDLIIKLPKYSLFELENGRKRMLASAGELQKGNELALPSKYVNFLYLASHYEKLKGSPEDNEQKQLFVEQHKHYLDEIIEQISEFSKRVILADANLDKVLSAYNKHRDKPIREQAENIIHLFTLTNLGAPAAFKYFDTTIDRKRYTSTKEVLDATLIHQSITGLYETRIDLSQLGGDSGGSSGGSSGSETPGTSESATPESSGGSSGGSSTIEVQRWEDKFEIKPGVWVYVPSVEARKVGGKILQAVRNKWIPPLYFYHLRTGGHLKAARLHLKSDFFAVVDIKQFFQSTNRSRITRDLSSYFTPSQAREISTFSTVRNLSHSPHDHVLPLGFVQSPILATLCLDKSPFGSLLRRLNKHHDLKLSVFMDDVIISSNNLAQLQAAYDEALVAMRKSGYQANMSKTQAPSSKISVFNLTLSKGVMKVTSQKMSDFLNDFNSSNYEPHRIGVKNYVEAVNPGQAKLFKLSGGSKRTADGSEFEPKKKRKV

SEQ ID NO: 1337 - protein, 1696 aa, synthetic construct
MKRTADGSEFESPKKKRKVDKKYSIGLDIGTNSVGWAVITDEYKVPSKKFKVLGNTDRHSIKKNLIGALLFDSGETAEATRLKRTARRRYTRRKNRICYLQEIFSNEMAKVDDSFFHRLEESFLVEEDKKHERHPIFGNIVDEVAYHEKYPTIYHLRKKLVDSTDKADLRLIYLALAHMIKFRGHFLIEGDLNPDNSDVDKLFIQLVQTYNQLFEENPINASGVDAKAILSARLSKSRRLENLIAQLPGEKKNGLFGNLIALSLGLTPNFKSNFDLAEDAKLQLSKDTYDDDLDNLLAQIGDQYADLFLAAKNLSDAILLSDILRVNTEITKAPLSASMIKRYDEHHQDLTLLKALVRQQLPEKYKEIFFDQSKNGYAGYIDGGASQEEFYKFIKPILEKMDGTEELLVKLNREDLLRKQRTFDNGSIPHQIHLGELHAILRRQEDFYPFLKDNREKIEKILTFRIPYYVGPLARGNSRFAWMTRKSEETITPWNFEEVVDKGASAQSFIERMTNFDKNLPNEKVLPKHSLLYEYFTVYNELTKVKYVTEGMRKPAFLSGEQKKAIVDLLFKTNRKVTVKQLKEDYFKKIECFDSVEISGVEDRFNASLGTYHDLLKIIKDKDFLDNEENEDILEDIVLTLTLFEDREMIEERLKTYAHLFDDKVMKQLKRRRYTGWGRLSRKLINGIRDKQSGKTILDFLKSDGFANRNFMQLIHDDSLTFKEDIQKAQVSGQGDSLHEHIANLAGSPAIKKGILQTVKVVDELVKVMGRHKPENIVIEMARENQTTQKGQKNSRERMKRIEEGIKELGSQILKEHPVENTQLQNEKLYLYYLQNGRDMYVDQELDINRLSDYDVDAIVPQSFLKDDSIDNKVLTRSDKNRGKSDNVPSEEVVKKMKNYWRQLLNAKLITQRKFDNLTKAERGGLSELDKAGFIKRQLVETRQITKHVAQILDSRMNTKYDENDKLIREVKVITLKSKLVSDFRKDFQFYKVREINNYHHAHDAYLNAVVGTALIKKYPKLESEFVYGDYKVYDVRKMIAKSEQEIGKATAKYFFYSNIMNFFKTEITLANGEIRKRPLIETNGETGEIVWDKGRDFATVRKVLSMPQVNIVKKTEVQTGGFSKESILPKRNSDKLIARKKDWDPKKYGGFDSPTVAYSVLVVAKVEKGKSKKLKSVKELLGITIMERSSFEKNPIDFLEAKGYKEVKKDLIIKLPKYSLFELENGRKRMLASAGELQKGNELALPSKYVNFLYLASHYEKLKGSPEDNEQKQLFVEQHKHYLDEIIEQISEFSKRVILADANLDKVLSAYNKHRDKPIREQAENIIHLFTLTNLGAPAAFKYFDTTIDRKRYTSTKEVLDATLIHQSITGLYETRIDLSQLGGDSGGSSGGSSGSETPGTSESATPESSGGSSGGSSTIEVQRWEDKFEIKPGVWVYVPSVEARKVGGKILQAVRNKWIPPLYFYHLRTGGHLKAARLHLKSDFFAVVDIKQFFQSTDRERITEDLKSYFTYSQAREISTFSTVRNLSHSPHKHVLPLGFVQSPILATLCLDKSYFGSLLRRLNKHHDLKLSVFMDDVIISSNNLAQLQAAYDEALVAMRKSGYQANMSKTQAPSSKISVFNLTLSKGVMKVTSQKMSDFLNDFNSSNYEPHRIGVKNYVEAVNPGQAKLFKLSGGSKRTADGSEFEPKKKRKV

SEQ ID NO: 1338 - protein, 1696 aa, synthetic construct
MKRTADGSEFESPKKKRKVDKKYSIGLDIGTNSVGWAVITDEYKVPSKKFKVLGNTDRHSIKKNLIGALLFDSGETAEATRLKRTARRRYTRRKNRICYLQEIFSNEMAKVDDSFFHRLEESFLVEEDKKHERHPIFGNIVDEVAYHEKYPTIYHLRKKLVDSTDKADLRLIYLALAHMIKFRGHFLIEGDLNPDNSDVDKLFIQLVQTYNQLFEENPINASGVDAKAILSARLSKSRRLENLIAQLPGEKKNGLFGNLIALSLGLTPNFKSNFDLAEDAKLQLSKDTYDDDLDNLLAQIGDQYADLFLAAKNLSDAILLSDILRVNTEITKAPLSASMIKRYDEHHQDLTLLKALVRQQLPEKYKEIFFDQSKNGYAGYIDGGASQEEFYKFIKPILEKMDGTEELLVKLNREDLLRKQRTFDNGSIPHQIHLGELHAILRRQEDFYPFLKDNREKIEKILTFRIPYYVGPLARGNSRFAWMTRKSEETITPWNFEEVVDKGASAQSFIERMTNFDKNLPNEKVLPKHSLLYEYFTVYNELTKVKYVTEGMRKPAFLSGEQKKAIVDLLFKTNRKVTVKQLKEDYFKKIECFDSVEISGVEDRFNASLGTYHDLLKIIKDKDFLDNEENEDILEDIVLTLTLFEDREMIEERLKTYAHLFDDKVMKQLKRRRYTGWGRLSRKLINGIRDKQSGKTILDFLKSDGFANRNFMQLIHDDSLTFKEDIQKAQVSGQGDSLHEHIANLAGSPAIKKGILQTVKVVDELVKVMGRHKPENIVIEMARENQTTQKGQKNSRERMKRIEEGIKELGSQILKEHPVENTQLQNEKLYLYYLQNGRDMYVDQELDINRLSDYDVDAIVPQSFLKDDSIDNKVLTRSDKNRGKSDNVPSEEVVKKMKNYWRQLLNAKLITQRKFDNLTKAERGGLSELDKAGFIKRQLVETRQITKHVAQILDSRMNTKYDENDKLIREVKVITLKSKLVSDFRKDFQFYKVREINNYHHAHDAYLNAVVGTALIKKYPKLESEFVYGDYKVYDVRKMIAKSEQEIGKATAKYFFYSNIMNFFKTEITLANGEIRKRPLIETNGETGEIVWDKGRDFATVRKVLSMPQVNIVKKTEVQTGGFSKESILPKRNSDKLIARKKDWDPKKYGGFDSPTVAYSVLVVAKVEKGKSKKLKSVKELLGITIMERSSFEKNPIDFLEAKGYKEVKKDLIIKLPKYSLFELENGRKRMLASAGELQKGNELALPSKYVNFLYLASHYEKLKGSPEDNEQKQLFVEQHKHYLDEIIEQISEFSKRVILADANLDKVLSAYNKHRDKPIREQAENIIHLFTLTNLGAPAAFKYFDTTIDRKRYTSTKEVLDATLIHQSITGLYETRIDLSQLGGDSGGSSGGSSGSETPGTSESATPESSGGSSGGSSTIEVQRWEDKFEIKPGVWVYVPSVEARKVGGKILQAVRNKWIPPLYFYHLRTGGHLKAARLHLKSDFFAVVDIKQFFQSTSRDMITRDLLSYFKYSQAREISTFSTVRNLSHSPHKHVLPLGFVQSPILATLCLDKSYFGSLLRRLNKHHDLKLSVFMDDVIISSNNLAQLQAAYDEALVAMRKSGYQANMSKTQAPSSKISVFNLTLSKGVMKVTSQKMSDFLNDFNSSNYEPHRIGVKNYVEAVNPGQAKLFKLSGGSKRTADGSEFEPKKKRKV

SEQ ID NO: 1339 - protein, 1696 aa, synthetic construct
MKRTADGSEFESPKKKRKVDKKYSIGLDIGTNSVGWAVITDEYKVPSKKFKVLGNTDRHSIKKNLIGALLFDSGETAEATRLKRTARRRYTRRKNRICYLQEIFSNEMAKVDDSFFHRLEESFLVEEDKKHERHPIFGNIVDEVAYHEKYPTIYHLRKKLVDSTDKADLRLIYLALAHMIKFRGHFLIEGDLNPDNSDVDKLFIQLVQTYNQLFEENPINASGVDAKAILSARLSKSRRLENLIAQLPGEKKNGLFGNLIALSLGLTPNFKSNFDLAEDAKLQLSKDTYDDDLDNLLAQIGDQYADLFLAAKNLSDAILLSDILRVNTEITKAPLSASMIKRYDEHHQDLTLLKALVRQQLPEKYKEIFFDQSKNGYAGYIDGGASQEEFYKFIKPILEKMDGTEELLVKLNREDLLRKQRTFDNGSIPHQIHLGELHAILRRQEDFYPFLKDNREKIEKILTFRIPYYVGPLARGNSRFAWMTRKSEETITPWNFEEVVDKGASAQSFIERMTNFDKNLPNEKVLPKHSLLYEYFTVYNELTKVKYVTEGMRKPAFLSGEQKKAIVDLLFKTNRKVTVKQLKEDYFKKIECFDSVEISGVEDRFNASLGTYHDLLKIIKDKDFLDNEENEDILEDIVLTLTLFEDREMIEERLKTYAHLFDDKVMKQLKRRRYTGWGRLSRKLINGIRDKQSGKTILDFLKSDGFANRNFMQLIHDDSLTFKEDIQKAQVSGQGDSLHEHIANLAGSPAIKKGILQTVKVVDELVKVMGRHKPENIVIEMARENQTTQKGQKNSRERMKRIEEGIKELGSQILKEHPVENTQLQNEKLYLYYLQNGRDMYVDQELDINRLSDYDVDAIVPQSFLKDDSIDNKVLTRSDKNRGKSDNVPSEEVVKKMKNYWRQLLNAKLITQRKFDNLTKAERGGLSELDKAGFIKRQLVETRQITKHVAQILDSRMNTKYDENDKLIREVKVITLKSKLVSDFRKDFQFYKVREINNYHHAHDAYLNAVVGTALIKKYPKLESEFVYGDYKVYDVRKMIAKSEQEIGKATAKYFFYSNIMNFFKTEITLANGEIRKRPLIETNGETGEIVWDKGRDFATVRKVLSMPQVNIVKKTEVQTGGFSKESILPKRNSDKLIARKKDWDPKKYGGFDSPTVAYSVLVVAKVEKGKSKKLKSVKELLGITIMERSSFEKNPIDFLEAKGYKEVKKDLIIKLPKYSLFELENGRKRMLASAGELQKGNELALPSKYVNFLYLASHYEKLKGSPEDNEQKQLFVEQHKHYLDEIIEQISEFSKRVILADANLDKVLSAYNKHRDKPIREQAENIIHLFTLTNLGAPAAFKYFDTTIDRKRYTSTKEVLDATLIHQSITGLYETRIDLSQLGGDSGGSSGGSSGSETPGTSESATPESSGGSSGGSSTIEVQRWEDKFEIKPGVWVYVPSVEARKVGGKILQAVRNKWIPPLYFYHLRTGGHLKAARLHLKSDFFAVVDIKQFFQSTSRDRITQDLKSYFTYSQAREISTFSTVRNLSHSPHKHVLPLGFVQSPILATLCLDKSPFGSLLRRLNKHHDLKLSVFMDDVIISSNNLAQLQAAYDEALVAMRKSGYQANMSKTQAPSSKISVFNLTLSKGVMKVTSQKMSDFLNDFNSSNYEPHRIGVKNYVEAVNPGQAKLFKLSGGSKRTADGSEFEPKKKRKV

SEQ ID NO: 1340 - protein, 1696 aa, synthetic construct
MKRTADGSEFESPKKKRKVDKKYSIGLDIGTNSVGWAVITDEYKVPSKKFKVLGNTDRHSIKKNLIGALLFDSGETAEATRLKRTARRRYTRRKNRICYLQEIFSNEMAKVDDSFFHRLEESFLVEEDKKHERHPIFGNIVDEVAYHEKYPTIYHLRKKLVDSTDKADLRLIYLALAHMIKFRGHFLIEGDLNPDNSDVDKLFIQLVQTYNQLFEENPINASGVDAKAILSARLSKSRRLENLIAQLPGEKKNGLFGNLIALSLGLTPNFKSNFDLAEDAKLQLSKDTYDDDLDNLLAQIGDQYADLFLAAKNLSDAILLSDILRVNTEITKAPLSASMIKRYDEHHQDLTLLKALVRQQLPEKYKEIFFDQSKNGYAGYIDGGASQEEFYKFIKPILEKMDGTEELLVKLNREDLLRKQRTFDNGSIPHQIHLGELHAILRRQEDFYPFLKDNREKIEKILTFRIPYYVGPLARGNSRFAWMTRKSEETITPWNFEEVVDKGASAQSFIERMTNFDKNLPNEKVLPKHSLLYEYFTVYNELTKVKYVTEGMRKPAFLSGEQKKAIVDLLFKTNRKVTVKQLKEDYFKKIECFDSVEISGVEDRFNASLGTYHDLLKIIKDKDFLDNEENEDILEDIVLTLTLFEDREMIEERLKTYAHLFDDKVMKQLKRRRYTGWGRLSRKLINGIRDKQSGKTILDFLKSDGFANRNFMQLIHDDSLTFKEDIQKAQVSGQGDSLHEHIANLAGSPAIKKGILQTVKVVDELVKVMGRHKPENIVIEMARENQTTQKGQKNSRERMKRIEEGIKELGSQILKEHPVENTQLQNEKLYLYYLQNGRDMYVDQELDINRLSDYDVDAIVPQSFLKDDSIDNKVLTRSDKNRGKSDNVPSEEVVKKMKNYWRQLLNAKLITQRKFDNLTKAERGGLSELDKAGFIKRQLVETRQITKHVAQILDSRMNTKYDENDKLIREVKVITLKSKLVSDFRKDFQFYKVREINNYHHAHDAYLNAVVGTALIKKYPKLESEFVYGDYKVYDVRKMIAKSEQEIGKATAKYFFYSNIMNFFKTEITLANGEIRKRPLIETNGETGEIVWDKGRDFATVRKVLSMPQVNIVKKTEVQTGGFSKESILPKRNSDKLIARKKDWDPKKYGGFDSPTVAYSVLVVAKVEKGKSKKLKSVKELLGITIMERSSFEKNPIDFLEAKGYKEVKKDLIIKLPKYSLFELENGRKRMLASAGELQKGNELALPSKYVNFLYLASHYEKLKGSPEDNEQKQLFVEQHKHYLDEIIEQISEFSKRVILADANLDKVLSAYNKHRDKPIREQAENIIHLFTLTNLGAPAAFKYFDTTIDRKRYTSTKEVLDATLIHQSITGLYETRIDLSQLGGDSGGSSGGSSGSETPGTSESATPESSGGSSGGSSTIEVQRWEDKFEIKPGVWVYVPSVEARKVGGKILQAVRNKWIPPLYFYHLRTGGHLKAARLHLKSDFFAVVDIKQFFQSTSRSRITRDLKSYFTYSQAREISTFSTVRNLSHSIHKHVLPFGFVQSPILATLCLDKSYFGSLLRRLNKNHDLKLSVFMDDVIISSNNLAQLQAAYDEALVAMRKSGYQANMSKTQAPSSKINVFNLTLSKGVMKVTSQKMSDFLIDFYSSNYEPHRIGVKNYVEAVNPGQAKLFKLSGGSKRTADGSEFEPKKKRKV

SEQ ID NO: 1341 - protein, 1696 aa, synthetic construct
MKRTADGSEFESPKKKRKVDKKYSIGLDIGTNSVGWAVITDEYKVPSKKFKVLGNTDRHSIKKNLIGALLFDSGETAEATRLKRTARRRYTRRKNRICYLQEIFSNEMAKVDDSFFHRLEESFLVEEDKKHERHPIFGNIVDEVAYHEKYPTIYHLRKKLVDSTDKADLRLIYLALAHMIKFRGHFLIEGDLNPDNSDVDKLFIQLVQTYNQLFEENPINASGVDAKAILSARLSKSRRLENLIAQLPGEKKNGLFGNLIALSLGLTPNFKSNFDLAEDAKLQLSKDTYDDDLDNLLAQIGDQYADLFLAAKNLSDAILLSDILRVNTEITKAPLSASMIKRYDEHHQDLTLLKALVRQQLPEKYKEIFFDQSKNGYAGYIDGGASQEEFYKFIKPILEKMDGTEELLVKLNREDLLRKQRTFDNGSIPHQIHLGELHAILRRQEDFYPFLKDNREKIEKILTFRIPYYVGPLARGNSRFAWMTRKSEETITPWNFEEVVDKGASAQSFIERMTNFDKNLPNEKVLPKHSLLYEYFTVYNELTKVKYVTEGMRKPAFLSGEQKKAIVDLLFKTNRKVTVKQLKEDYFKKIECFDSVEISGVEDRFNASLGTYHDLLKIIKDKDFLDNEENEDILEDIVLTLTLFEDREMIEERLKTYAHLFDDKVMKQLKRRRYTGWGRLSRKLINGIRDKQSGKTILDFLKSDGFANRNFMQLIHDDSLTFKEDIQKAQVSGQGDSLHEHIANLAGSPAIKKGILQTVKVVDELVKVMGRHKPENIVIEMARENQTTQKGQKNSRERMKRIEEGIKELGSQILKEHPVENTQLQNEKLYLYYLQNGRDMYVDQELDINRLSDYDVDAIVPQSFLKDDSIDNKVLTRSDKNRGKSDNVPSEEVVKKMKNYWRQLLNAKLITQRKFDNLTKAERGGLSELDKAGFIKRQLVETRQITKHVAQILDSRMNTKYDENDKLIREVKVITLKSKLVSDFRKDFQFYKVREINNYHHAHDAYLNAVVGTALIKKYPKLESEFVYGDYKVYDVRKMIAKSEQEIGKATAKYFFYSNIMNFFKTEITLANGEIRKRPLIETNGETGEIVWDKGRDFATVRKVLSMPQVNIVKKTEVQTGGFSKESILPKRNSDKLIARKKDWDPKKYGGFDSPTVAYSVLVVAKVEKGKSKKLKSVKELLGITIMERSSFEKNPIDFLEAKGYKEVKKDLIIKLPKYSLFELENGRKRMLASAGELQKGNELALPSKYVNFLYLASHYEKLKGSPEDNEQKQLFVEQHKHYLDEIIEQISEFSKRVILADANLDKVLSAYNKHRDKPIREQAENIIHLFTLTNLGAPAAFKYFDTTIDRKRYTSTKEVLDATLIHQSITGLYETRIDLSQLGGDSGGSSGGSSGSETPGTSESATPESSGGSSGGSSTIEVQRWEDKFEIKPGVWVYVPSVEARKVGGKILQAVRNKWIPPLYFYHLRTGGHLKAARLHLKSDFFAVVDIKQFFQSTSRSRIERDLKSYFTQSQAREISTFSTVRNLNHSPHKHVLPGGFVQSPILATLCLDKSPFGSLLRRLNKHHDLKLSVFMDDVIISSNNLAQLQAAYDEALVAMRKSGYQANMSKTQAPSSKISVFNLTLSKGVMKVTSQKMSDFLNDFNSSNYEPHRIGVKNYVEAVNPGQAKLFKLSGGSKRTADGSEFEPKKKRKV

SEQ ID NO: 1342 - protein, 1696 aa, synthetic construct
MKRTADGSEFESPKKKRKVDKKYSIGLDIGTNSVGWAVITDEYKVPSKKFKVLGNTDRHSIKKNLIGALLFDSGETAEATRLKRTARRRYTRRKNRICYLQEIFSNEMAKVDDSFFHRLEESFLVEEDKKHERHPIFGNIVDEVAYHEKYPTIYHLRKKLVDSTDKADLRLIYLALAHMIKFRGHFLIEGDLNPDNSDVDKLFIQLVQTYNQLFEENPINASGVDAKAILSARLSKSRRLENLIAQLPGEKKNGLFGNLIALSLGLTPNFKSNFDLAEDAKLQLSKDTYDDDLDNLLAQIGDQYADLFLAAKNLSDAILLSDILRVNTEITKAPLSASMIKRYDEHHQDLTLLKALVRQQLPEKYKEIFFDQSKNGYAGYIDGGASQEEFYKFIKPILEKMDGTEELLVKLNREDLLRKQRTFDNGSIPHQIHLGELHAILRRQEDFYPFLKDNREKIEKILTFRIPYYVGPLARGNSRFAWMTRKSEETITPWNFEEVVDKGASAQSFIERMTNFDKNLPNEKVLPKHSLLYEYFTVYNELTKVKYVTEGMRKPAFLSGEQKKAIVDLLFKTNRKVTVKQLKEDYFKKIECFDSVEISGVEDRFNASLGTYHDLLKIIKDKDFLDNEENEDILEDIVLTLTLFEDREMIEERLKTYAHLFDDKVMKQLKRRRYTGWGRLSRKLINGIRDKQSGKTILDFLKSDGFANRNFMQLIHDDSLTFKEDIQKAQVSGQGDSLHEHIANLAGSPAIKKGILQTVKVVDELVKVMGRHKPENIVIEMARENQTTQKGQKNSRERMKRIEEGIKELGSQILKEHPVENTQLQNEKLYLYYLQNGRDMYVDQELDINRLSDYDVDAIVPQSFLKDDSIDNKVLTRSDKNRGKSDNVPSEEVVKKMKNYWRQLLNAKLITQRKFDNLTKAERGGLSELDKAGFIKRQLVETRQITKHVAQILDSRMNTKYDENDKLIREVKVITLKSKLVSDFRKDFQFYKVREINNYHHAHDAYLNAVVGTALIKKYPKLESEFVYGDYKVYDVRKMIAKSEQEIGKATAKYFFYSNIMNFFKTEITLANGEIRKRPLIETNGETGEIVWDKGRDFATVRKVLSMPQVNIVKKTEVQTGGFSKESILPKRNSDKLIARKKDWDPKKYGGFDSPTVAYSVLVVAKVEKGKSKKLKSVKELLGITIMERSSFEKNPIDFLEAKGYKEVKKDLIIKLPKYSLFELENGRKRMLASAGELQKGNELALPSKYVNFLYLASHYEKLKGSPEDNEQKQLFVEQHKHYLDEIIEQISEFSKRVILADANLDKVLSAYNKHRDKPIREQAENIIHLFTLTNLGAPAAFKYFDTTIDRKRYTSTKEVLDATLIHQSITGLYETRIDLSQLGGDSGGSSGGSSGSETPGTSESATPESSGGSSGGSSTIEVQRWEDKFEIKPGVWVYVPSVEARKVGGKILQAVRNKWIPPLYFYHLRTGGHLKAARLHLKSDFFAVVDIKQFFQSTCRSRITQDLKSYFTPSQAREISTFSTVRNLSHSPHKHVLPFGFVQSPILATLCLDKSPFGSLLRRLNKHHDLKLSVFMDDVIISSNNLAQLQAAYDEALVAMRKSGYQANMSKTQAPSSKISVFNLTLSKGVMKVTSQKMSDFLNDFNSSNYEPHRIGVKNYVEAVNPGQAKLFKLSGGSKRTADGSEFEPKKKRKV

SEQ ID NO: 1343 - protein, 1696 aa, synthetic construct
MKRTADGSEFESPKKKRKVDKKYSIGLDIGTNSVGWAVITDEYKVPSKKFKVLGNTDRHSIKKNLIGALLFDSGETAEATRLKRTARRRYTRRKNRICYLQEIFSNEMAKVDDSFFHRLEESFLVEEDKKHERHPIFGNIVDEVAYHEKYPTIYHLRKKLVDSTDKADLRLIYLALAHMIKFRGHFLIEGDLNPDNSDVDKLFIQLVQTYNQLFEENPINASGVDAKAILSARLSKSRRLENLIAQLPGEKKNGLFGNLIALSLGLTPNFKSNFDLAEDAKLQLSKDTYDDDLDNLLAQIGDQYADLFLAAKNLSDAILLSDILRVNTEITKAPLSASMIKRYDEHHQDLTLLKALVRQQLPEKYKEIFFDQSKNGYAGYIDGGASQEEFYKFIKPILEKMDGTEELLVKLNREDLLRKQRTFDNGSIPHQIHLGELHAILRRQEDFYPFLKDNREKIEKILTFRIPYYVGPLARGNSRFAWMTRKSEETITPWNFEEVVDKGASAQSFIERMTNFDKNLPNEKVLPKHSLLYEYFTVYNELTKVKYVTEGMRKPAFLSGEQKKAIVDLLFKTNRKVTVKQLKEDYFKKIECFDSVEISGVEDRFNASLGTYHDLLKIIKDKDFLDNEENEDILEDIVLTLTLFEDREMIEERLKTYAHLFDDKVMKQLKRRRYTGWGRLSRKLINGIRDKQSGKTILDFLKSDGFANRNFMQLIHDDSLTFKEDIQKAQVSGQGDSLHEHIANLAGSPAIKKGILQTVKVVDELVKVMGRHKPENIVIEMARENQTTQKGQKNSRERMKRIEEGIKELGSQILKEHPVENTQLQNEKLYLYYLQNGRDMYVDQELDINRLSDYDVDAIVPQSFLKDDSIDNKVLTRSDKNRGKSDNVPSEEVVKKMKNYWRQLLNAKLITQRKFDNLTKAERGGLSELDKAGFIKRQLVETRQITKHVAQILDSRMNTKYDENDKLIREVKVITLKSKLVSDFRKDFQFYKVREINNYHHAHDAYLNAVVGTALIKKYPKLESEFVYGDYKVYDVRKMIAKSEQEIGKATAKYFFYSNIMNFFKTEITLANGEIRKRPLIETNGETGEIVWDKGRDFATVRKVLSMPQVNIVKKTEVQTGGFSKESILPKRNSDKLIARKKDWDPKKYGGFDSPTVAYSVLVVAKVEKGKSKKLKSVKELLGITIMERSSFEKNPIDFLEAKGYKEVKKDLIIKLPKYSLFELENGRKRMLASAGELQKGNELALPSKYVNFLYLASHYEKLKGSPEDNEQKQLFVEQHKHYLDEIIEQISEFSKRVILADANLDKVLSAYNKHRDKPIREQAENIIHLFTLTNLGAPAAFKYFDTTIDRKRYTSTKEVLDATLIHQSITGLYETRIDLSQLGGDSGGSSGGSSGSETPGTSESATPESSGGSSGGSSTIEVQRWEDKFEIKPGVWVYVPSVEARKVGGKILQAVRNKWIPPLYFYHLRTGGHLKAARLHLKSDFFAVVDIKQFFQSTDRSRIERDLKSYFTYSQAREISTFSTVRNLSHSPHKHVLPLGFVQSPILATLCLDKSYFGSLLRRLNKHHDLKLSVFMDDVIISSNNLAQLQAAYDEALVAMRKSGYQANMSKTQAPSSKISVFNLTLSKGVMKVTSQKMSDFLNDFNSSNYEPHRIGVKNYVEAVNPGQAKLFKLSGGSKRTADGSEFEPKKKRKV

SEQ ID NO: 1344 - protein, 1696 aa, synthetic construct
MKRTADGSEFESPKKKRKVDKKYSIGLDIGTNSVGWAVITDEYKVPSKKFKVLGNTDRHSIKKNLIGALLFDSGETAEATRLKRTARRRYTRRKNRICYLQEIFSNEMAKVDDSFFHRLEESFLVEEDKKHERHPIFGNIVDEVAYHEKYPTIYHLRKKLVDSTDKADLRLIYLALAHMIKFRGHFLIEGDLNPDNSDVDKLFIQLVQTYNQLFEENPINASGVDAKAILSARLSKSRRLENLIAQLPGEKKNGLFGNLIALSLGLTPNFKSNFDLAEDAKLQLSKDTYDDDLDNLLAQIGDQYADLFLAAKNLSDAILLSDILRVNTEITKAPLSASMIKRYDEHHQDLTLLKALVRQQLPEKYKEIFFDQSKNGYAGYIDGGASQEEFYKFIKPILEKMDGTEELLVKLNREDLLRKQRTFDNGSIPHQIHLGELHAILRRQEDFYPFLKDNREKIEKILTFRIPYYVGPLARGNSRFAWMTRKSEETITPWNFEEVVDKGASAQSFIERMTNFDKNLPNEKVLPKHSLLYEYFTVYNELTKVKYVTEGMRKPAFLSGEQKKAIVDLLFKTNRKVTVKQLKEDYFKKIECFDSVEISGVEDRFNASLGTYHDLLKIIKDKDFLDNEENEDILEDIVLTLTLFEDREMIEERLKTYAHLFDDKVMKQLKRRRYTGWGRLSRKLINGIRDKQSGKTILDFLKSDGFANRNFMQLIHDDSLTFKEDIQKAQVSGQGDSLHEHIANLAGSPAIKKGILQTVKVVDELVKVMGRHKPENIVIEMARENQTTQKGQKNSRERMKRIEEGIKELGSQILKEHPVENTQLQNEKLYLYYLQNGRDMYVDQELDINRLSDYDVDAIVPQSFLKDDSIDNKVLTRSDKNRGKSDNVPSEEVVKKMKNYWRQLLNAKLITQRKFDNLTKAERGGLSELDKAGFIKRQLVETRQITKHVAQILDSRMNTKYDENDKLIREVKVITLKSKLVSDFRKDFQFYKVREINNYHHAHDAYLNAVVGTALIKKYPKLESEFVYGDYKVYDVRKMIAKSEQEIGKATAKYFFYSNIMNFFKTEITLANGEIRKRPLIETNGETGEIVWDKGRDFATVRKVLSMPQVNIVKKTEVQTGGFSKESILPKRNSDKLIARKKDWDPKKYGGFDSPTVAYSVLVVAKVEKGKSKKLKSVKELLGITIMERSSFEKNPIDFLEAKGYKEVKKDLIIKLPKYSLFELENGRKRMLASAGELQKGNELALPSKYVNFLYLASHYEKLKGSPEDNEQKQLFVEQHKHYLDEIIEQISEFSKRVILADANLDKVLSAYNKHRDKPIREQAENIIHLFTLTNLGAPAAFKYFDTTIDRKRYTSTKEVLDATLIHQSITGLYETRIDLSQLGGDSGGSSGGSSGSETPGTSESATPESSGGSSGGSSTIEVQRWEDKFEIKPGVWVYVPSVEARKVGGKILQAVRNKWIPPLYFYHLRTGGHLKAARLHLKSDFFAVVDIKQFFQSTNRARITRDLKSYFEYSQAEEISTFSTVRCLNHHPHDHVLPLGFVQSPILATLCLDKSPFGSLLRRLNKHHDLKLSVFMDDVIISSNNLAQLQAAYDEALVAMRKSGYQANMSKTQAPSSKISVFNLTLSKGVMKVTSQKMSDFLNDFNSSNYEPHRIGVKNYVEAVNPGQAKLFKLSGGSKRTADGSEFEPKKKRKV

SEQ ID NO: 1345 - protein, 1696 aa, synthetic construct
MKRTADGSEFESPKKKRKVDKKYSIGLDIGTNSVGWAVITDEYKVPSKKFKVLGNTDRHSIKKNLIGALLFDSGETAEATRLKRTARRRYTRRKNRICYLQEIFSNEMAKVDDSFFHRLEESFLVEEDKKHERHPIFGNIVDEVAYHEKYPTIYHLRKKLVDSTDKADLRLIYLALAHMIKFRGHFLIEGDLNPDNSDVDKLFIQLVQTYNQLFEENPINASGVDAKAILSARLSKSRRLENLIAQLPGEKKNGLFGNLIALSLGLTPNFKSNFDLAEDAKLQLSKDTYDDDLDNLLAQIGDQYADLFLAAKNLSDAILLSDILRVNTEITKAPLSASMIKRYDEHHQDLTLLKALVRQQLPEKYKEIFFDQSKNGYAGYIDGGASQEEFYKFIKPILEKMDGTEELLVKLNREDLLRKQRTFDNGSIPHQIHLGELHAILRRQEDFYPFLKDNREKIEKILTFRIPYYVGPLARGNSRFAWMTRKSEETITPWNFEEVVDKGASAQSFIERMTNFDKNLPNEKVLPKHSLLYEYFTVYNELTKVKYVTEGMRKPAFLSGEQKKAIVDLLFKTNRKVTVKQLKEDYFKKIECFDSVEISGVEDRFNASLGTYHDLLKIIKDKDFLDNEENEDILEDIVLTLTLFEDREMIEERLKTYAHLFDDKVMKQLKRRRYTGWGRLSRKLINGIRDKQSGKTILDFLKSDGFANRNFMQLIHDDSLTFKEDIQKAQVSGQGDSLHEHIANLAGSPAIKKGILQTVKVVDELVKVMGRHKPENIVIEMARENQTTQKGQKNSRERMKRIEEGIKELGSQILKEHPVENTQLQNEKLYLYYLQNGRDMYVDQELDINRLSDYDVDAIVPQSFLKDDSIDNKVLTRSDKNRGKSDNVPSEEVVKKMKNYWRQLLNAKLITQRKFDNLTKAERGGLSELDKAGFIKRQLVETRQITKHVAQILDSRMNTKYDENDKLIREVKVITLKSKLVSDFRKDFQFYKVREINNYHHAHDAYLNAVVGTALIKKYPKLESEFVYGDYKVYDVRKMIAKSEQEIGKATAKYFFYSNIMNFFKTEITLANGEIRKRPLIETNGETGEIVWDKGRDFATVRKVLSMPQVNIVKKTEVQTGGFSKESILPKRNSDKLIARKKDWDPKKYGGFDSPTVAYSVLVVAKVEKGKSKKLKSVKELLGITIMERSSFEKNPIDFLEAKGYKEVKKDLIIKLPKYSLFELENGRKRMLASAGELQKGNELALPSKYVNFLYLASHYEKLKGSPEDNEQKQLFVEQHKHYLDEIIEQISEFSKRVILADANLDKVLSAYNKHRDKPIREQAENIIHLFTLTNLGAPAAFKYFDTTIDRKRYTSTKEVLDATLIHQSITGLYETRIDLSQLGGDSGGSSGGSSGSETPGTSESATPESSGGSSGGSSTIEVQRWEDKFEKKPGVPVYVPSVEARKVGGKILQAVRNKWIPPLYFYHLRTGGHLKAARLHLKSDFFAVVDIKQFFQSTSRERITRDLKSYFTESQAREISTFSTVRCLSHSPHKHVLPLGFVQSPILATLCLDKSYFGSLLRRLNKHHDLKLSVFMDDVIISSNNLAQLQAAYDEALVAMRKSGYQANMSKTQAPSSKISVFNLTLSKGVMKVTSQKMSDFLIDFYSSNYEPHRIGVKNYVEAVNPGQAKLFKLSGGSKRTADGSEFEPKKKRKV

SEQ ID NO: 1346 - protein, 1696 aa, synthetic construct
MKRTADGSEFESPKKKRKVDKKYSIGLDIGTNSVGWAVITDEYKVPSKKFKVLGNTDRHSIKKNLIGALLFDSGETAEATRLKRTARRRYTRRKNRICYLQEIFSNEMAKVDDSFFHRLEESFLVEEDKKHERHPIFGNIVDEVAYHEKYPTIYHLRKKLVDSTDKADLRLIYLALAHMIKFRGHFLIEGDLNPDNSDVDKLFIQLVQTYNQLFEENPINASGVDAKAILSARLSKSRRLENLIAQLPGEKKNGLFGNLIALSLGLTPNFKSNFDLAEDAKLQLSKDTYDDDLDNLLAQIGDQYADLFLAAKNLSDAILLSDILRVNTEITKAPLSASMIKRYDEHHQDLTLLKALVRQQLPEKYKEIFFDQSKNGYAGYIDGGASQEEFYKFIKPILEKMDGTEELLVKLNREDLLRKQRTFDNGSIPHQIHLGELHAILRRQEDFYPFLKDNREKIEKILTFRIPYYVGPLARGNSRFAWMTRKSEETITPWNFEEVVDKGASAQSFIERMTNFDKNLPNEKVLPKHSLLYEYFTVYNELTKVKYVTEGMRKPAFLSGEQKKAIVDLLFKTNRKVTVKQLKEDYFKKIECFDSVEISGVEDRFNASLGTYHDLLKIIKDKDFLDNEENEDILEDIVLTLTLFEDREMIEERLKTYAHLFDDKVMKQLKRRRYTGWGRLSRKLINGIRDKQSGKTILDFLKSDGFANRNFMQLIHDDSLTFKEDIQKAQVSGQGDSLHEHIANLAGSPAIKKGILQTVKVVDELVKVMGRHKPENIVIEMARENQTTQKGQKNSRERMKRIEEGIKELGSQILKEHPVENTQLQNEKLYLYYLQNGRDMYVDQELDINRLSDYDVDAIVPQSFLKDDSIDNKVLTRSDKNRGKSDNVPSEEVVKKMKNYWRQLLNAKLITQRKFDNLTKAERGGLSELDKAGFIKRQLVETRQITKHVAQILDSRMNTKYDENDKLIREVKVITLKSKLVSDFRKDFQFYKVREINNYHHAHDAYLNAVVGTALIKKYPKLESEFVYGDYKVYDVRKMIAKSEQEIGKATAKYFFYSNIMNFFKTEITLANGEIRKRPLIETNGETGEIVWDKGRDFATVRKVLSMPQVNIVKKTEVQTGGFSKESILPKRNSDKLIARKKDWDPKKYGGFDSPTVAYSVLVVAKVEKGKSKKLKSVKELLGITIMERSSFEKNPIDFLEAKGYKEVKKDLIIKLPKYSLFELENGRKRMLASAGELQKGNELALPSKYVNFLYLASHYEKLKGSPEDNEQKQLFVEQHKHYLDEIIEQISEFSKRVILADANLDKVLSAYNKHRDKPIREQAENIIHLFTLTNLGAPAAFKYFDTTIDRKRYTSTKEVLDATLIHQSITGLYETRIDLSQLGGDSGGSSGGSSGSETPGTSESATPESSGGSSGGSSTIEVQRWEDKFEIKPGVWVYVPSVEARKVGGKILQAVRNKWIPPLYFYHLRTGGHLKAARLHLKSDFFAVVDIKQFFQSTSRDRITQDLKSYFTYSQAREISTFSTVRNLSHSPHKHVLPLGFVQSPILATLCLDKSPFGSLLRRLNKHHDLKLSVFMDDVIISSNNLAQLQAAYDEALVAMRKSGYQANMSKTQAPSSKISVFNLTLSKGVMKVTSQKMSDFLIDFYSSNYEPHRIGVKNYVEAVNPGQAKLFKLSGGSKRTADGSEFEPKKKRKV

SEQ ID NO: 1347 - protein, 1696 aa, synthetic construct
MKRTADGSEFESPKKKRKVDKKYSIGLDIGTNSVGWAVITDEYKVPSKKFKVLGNTDRHSIKKNLIGALLFDSGETAEATRLKRTARRRYTRRKNRICYLQEIFSNEMAKVDDSFFHRLEESFLVEEDKKHERHPIFGNIVDEVAYHEKYPTIYHLRKKLVDSTDKADLRLIYLALAHMIKFRGHFLIEGDLNPDNSDVDKLFIQLVQTYNQLFEENPINASGVDAKAILSARLSKSRRLENLIAQLPGEKKNGLFGNLIALSLGLTPNFKSNFDLAEDAKLQLSKDTYDDDLDNLLAQIGDQYADLFLAAKNLSDAILLSDILRVNTEITKAPLSASMIKRYDEHHQDLTLLKALVRQQLPEKYKEIFFDQSKNGYAGYIDGGASQEEFYKFIKPILEKMDGTEELLVKLNREDLLRKQRTFDNGSIPHQIHLGELHAILRRQEDFYPFLKDNREKIEKILTFRIPYYVGPLARGNSRFAWMTRKSEETITPWNFEEVVDKGASAQSFIERMTNFDKNLPNEKVLPKHSLLYEYFTVYNELTKVKYVTEGMRKPAFLSGEQKKAIVDLLFKTNRKVTVKQLKEDYFKKIECFDSVEISGVEDRFNASLGTYHDLLKIIKDKDFLDNEENEDILEDIVLTLTLFEDREMIEERLKTYAHLFDDKVMKQLKRRRYTGWGRLSRKLINGIRDKQSGKTILDFLKSDGFANRNFMQLIHDDSLTFKEDIQKAQVSGQGDSLHEHIANLAGSPAIKKGILQTVKVVDELVKVMGRHKPENIVIEMARENQTTQKGQKNSRERMKRIEEGIKELGSQILKEHPVENTQLQNEKLYLYYLQNGRDMYVDQELDINRLSDYDVDAIVPQSFLKDDSIDNKVLTRSDKNRGKSDNVPSEEVVKKMKNYWRQLLNAKLITQRKFDNLTKAERGGLSELDKAGFIKRQLVETRQITKHVAQILDSRMNTKYDENDKLIREVKVITLKSKLVSDFRKDFQFYKVREINNYHHAHDAYLNAVVGTALIKKYPKLESEFVYGDYKVYDVRKMIAKSEQEIGKATAKYFFYSNIMNFFKTEITLANGEIRKRPLIETNGETGEIVWDKGRDFATVRKVLSMPQVNIVKKTEVQTGGFSKESILPKRNSDKLIARKKDWDPKKYGGFDSPTVAYSVLVVAKVEKGKSKKLKSVKELLGITIMERSSFEKNPIDFLEAKGYKEVKKDLIIKLPKYSLFELENGRKRMLASAGELQKGNELALPSKYVNFLYLASHYEKLKGSPEDNEQKQLFVEQHKHYLDEIIEQISEFSKRVILADANLDKVLSAYNKHRDKPIREQAENIIHLFTLTNLGAPAAFKYFDTTIDRKRYTSTKEVLDATLIHQSITGLYETRIDLSQLGGDSGGSSGGSSGSETPGTSESATPESSGGSSGGSSTIEVQRWEDKFEKKPGVPVYVPSVEARKVGGKILQAVRNKWIPPLYFYHLRTGGHLKAARLHLKSDFFAVVDIKQFFQSTSRSRIERDLKSYFTPSQAREISTFSTVRNLNHSPHKHVLPGGFVQSPILATLCLDKSPFGSLLRRLNKHHDLKLSVFMDDVIISSNNLAQLQAAYDEALVAMRKSGYQANMSKTQAPSSKISVFNLTLSKGVMKVTSQKMSDFLIDFYSSNYEPHRIGVKNYVEAVNPGQAKLFKLSGGSKRTADGSEFEPKKKRKV

SEQ ID NO: 1348 - protein, 1696 aa, synthetic construct
MKRTADGSEFESPKKKRKVDKKYSIGLDIGTNSVGWAVITDEYKVPSKKFKVLGNTDRHSIKKNLIGALLFDSGETAEATRLKRTARRRYTRRKNRICYLQEIFSNEMAKVDDSFFHRLEESFLVEEDKKHERHPIFGNIVDEVAYHEKYPTIYHLRKKLVDSTDKADLRLIYLALAHMIKFRGHFLIEGDLNPDNSDVDKLFIQLVQTYNQLFEENPINASGVDAKAILSARLSKSRRLENLIAQLPGEKKNGLFGNLIALSLGLTPNFKSNFDLAEDAKLQLSKDTYDDDLDNLLAQIGDQYADLFLAAKNLSDAILLSDILRVNTEITKAPLSASMIKRYDEHHQDLTLLKALVRQQLPEKYKEIFFDQSKNGYAGYIDGGASQEEFYKFIKPILEKMDGTEELLVKLNREDLLRKQRTFDNGSIPHQIHLGELHAILRRQEDFYPFLKDNREKIEKILTFRIPYYVGPLARGNSRFAWMTRKSEETITPWNFEEVVDKGASAQSFIERMTNFDKNLPNEKVLPKHSLLYEYFTVYNELTKVKYVTEGMRKPAFLSGEQKKAIVDLLFKTNRKVTVKQLKEDYFKKIECFDSVEISGVEDRFNASLGTYHDLLKIIKDKDFLDNEENEDILEDIVLTLTLFEDREMIEERLKTYAHLFDDKVMKQLKRRRYTGWGRLSRKLINGIRDKQSGKTILDFLKSDGFANRNFMQLIHDDSLTFKEDIQKAQVSGQGDSLHEHIANLAGSPAIKKGILQTVKVVDELVKVMGRHKPENIVIEMARENQTTQKGQKNSRERMKRIEEGIKELGSQILKEHPVENTQLQNEKLYLYYLQNGRDMYVDQELDINRLSDYDVDAIVPQSFLKDDSIDNKVLTRSDKNRGKSDNVPSEEVVKKMKNYWRQLLNAKLITQRKFDNLTKAERGGLSELDKAGFIKRQLVETRQITKHVAQILDSRMNTKYDENDKLIREVKVITLKSKLVSDFRKDFQFYKVREINNYHHAHDAYLNAVVGTALIKKYPKLESEFVYGDYKVYDVRKMIAKSEQEIGKATAKYFFYSNIMNFFKTEITLANGEIRKRPLIETNGETGEIVWDKGRDFATVRKVLSMPQVNIVKKTEVQTGGFSKESILPKRNSDKLIARKKDWDPKKYGGFDSPTVAYSVLVVAKVEKGKSKKLKSVKELLGITIMERSSFEKNPIDFLEAKGYKEVKKDLIIKLPKYSLFELENGRKRMLASAGELQKGNELALPSKYVNFLYLASHYEKLKGSPEDNEQKQLFVEQHKHYLDEIIEQISEFSKRVILADANLDKVLSAYNKHRDKPIREQAENIIHLFTLTNLGAPAAFKYFDTTIDRKRYTSTKEVLDATLIHQSITGLYETRIDLSQLGGDSGGSSGGSSGSETPGTSESATPESSGGSSGGSSTIEVQRWEDKFEKKPGVPVYVPSVEARKVGGKILQAVRNKWIPPLYFYHLRTGGHLKAARLHLKSDFFAVVDIKQFFQSTSRSRITQDLLSYFKESQAREISTFSTVRNLSHSPHKHVLPLGFVQSPILATLCLDKSPFGSLLRRLNKHHDLKLSVFMDDVIISSNNLAQLQAAYDEALVAMRKSGYQANMSKTQAPSSKISVFNLTLSKGVMKVTSQKMSDFLIDFYSSNYEPHRIGVKNYVEAVNPGQAKLFKLSGGSKRTADGSEFEPKKKRKV

SEQ ID NO: 1349 - protein, 1696 aa, synthetic construct
MKRTADGSEFESPKKKRKVDKKYSIGLDIGTNSVGWAVITDEYKVPSKKFKVLGNTDRHSIKKNLIGALLFDSGETAEATRLKRTARRRYTRRKNRICYLQEIFSNEMAKVDDSFFHRLEESFLVEEDKKHERHPIFGNIVDEVAYHEKYPTIYHLRKKLVDSTDKADLRLIYLALAHMIKFRGHFLIEGDLNPDNSDVDKLFIQLVQTYNQLFEENPINASGVDAKAILSARLSKSRRLENLIAQLPGEKKNGLFGNLIALSLGLTPNFKSNFDLAEDAKLQLSKDTYDDDLDNLLAQIGDQYADLFLAAKNLSDAILLSDILRVNTEITKAPLSASMIKRYDEHHQDLTLLKALVRQQLPEKYKEIFFDQSKNGYAGYIDGGASQEEFYKFIKPILEKMDGTEELLVKLNREDLLRKQRTFDNGSIPHQIHLGELHAILRRQEDFYPFLKDNREKIEKILTFRIPYYVGPLARGNSRFAWMTRKSEETITPWNFEEVVDKGASAQSFIERMTNFDKNLPNEKVLPKHSLLYEYFTVYNELTKVKYVTEGMRKPAFLSGEQKKAIVDLLFKTNRKVTVKQLKEDYFKKIECFDSVEISGVEDRFNASLGTYHDLLKIIKDKDFLDNEENEDILEDIVLTLTLFEDREMIEERLKTYAHLFDDKVMKQLKRRRYTGWGRLSRKLINGIRDKQSGKTILDFLKSDGFANRNFMQLIHDDSLTFKEDIQKAQVSGQGDSLHEHIANLAGSPAIKKGILQTVKVVDELVKVMGRHKPENIVIEMARENQTTQKGQKNSRERMKRIEEGIKELGSQILKEHPVENTQLQNEKLYLYYLQNGRDMYVDQELDINRLSDYDVDAIVPQSFLKDDSIDNKVLTRSDKNRGKSDNVPSEEVVKKMKNYWRQLLNAKLITQRKFDNLTKAERGGLSELDKAGFIKRQLVETRQITKHVAQILDSRMNTKYDENDKLIREVKVITLKSKLVSDFRKDFQFYKVREINNYHHAHDAYLNAVVGTALIKKYPKLESEFVYGDYKVYDVRKMIAKSEQEIGKATAKYFFYSNIMNFFKTEITLANGEIRKRPLIETNGETGEIVWDKGRDFATVRKVLSMPQVNIVKKTEVQTGGFSKESILPKRNSDKLIARKKDWDPKKYGGFDSPTVAYSVLVVAKVEKGKSKKLKSVKELLGITIMERSSFEKNPIDFLEAKGYKEVKKDLIIKLPKYSLFELENGRKRMLASAGELQKGNELALPSKYVNFLYLASHYEKLKGSPEDNEQKQLFVEQHKHYLDEIIEQISEFSKRVILADANLDKVLSAYNKHRDKPIREQAENIIHLFTLTNLGAPAAFKYFDTTIDRKRYTSTKEVLDATLIHQSITGLYETRIDLSQLGGDSGGSSGGSSGSETPGTSESATPESSGGSSGGSSTIEVQRWEDKFEKKPGVPVYVPSVEARKVGGKILQAVRNKWIPPLYFYHLRTGGHLKAARLHLKSDFFAVVDIKQFFQSTNRSRITRDLKSYFTYSQAREISTFSTVRNLSHSPHDHVLPLGFVQSPILATLCLDKSPFGSLLRRLNKHHDLKLSVFMDDVIISSNNLAQLQAAYDEALVAMRKSGYQANMSKTQAPSSKISVFNLTLSKGVMKVTSQKMSDFLIDFYSSNYEPHRIGVKNYVEAVNPGQAKLFKLSGGSKRTADGSEFEPKKKRKV

SEQ ID NO: 1350 - protein, 1696 aa, synthetic construct
MKRTADGSEFESPKKKRKVDKKYSIGLDIGTNSVGWAVITDEYKVPSKKFKVLGNTDRHSIKKNLIGALLFDSGETAEATRLKRTARRRYTRRKNRICYLQEIFSNEMAKVDDSFFHRLEESFLVEEDKKHERHPIFGNIVDEVAYHEKYPTIYHLRKKLVDSTDKADLRLIYLALAHMIKFRGHFLIEGDLNPDNSDVDKLFIQLVQTYNQLFEENPINASGVDAKAILSARLSKSRRLENLIAQLPGEKKNGLFGNLIALSLGLTPNFKSNFDLAEDAKLQLSKDTYDDDLDNLLAQIGDQYADLFLAAKNLSDAILLSDILRVNTEITKAPLSASMIKRYDEHHQDLTLLKALVRQQLPEKYKEIFFDQSKNGYAGYIDGGASQEEFYKFIKPILEKMDGTEELLVKLNREDLLRKQRTFDNGSIPHQIHLGELHAILRRQEDFYPFLKDNREKIEKILTFRIPYYVGPLARGNSRFAWMTRKSEETITPWNFEEVVDKGASAQSFIERMTNFDKNLPNEKVLPKHSLLYEYFTVYNELTKVKYVTEGMRKPAFLSGEQKKAIVDLLFKTNRKVTVKQLKEDYFKKIECFDSVEISGVEDRFNASLGTYHDLLKIIKDKDFLDNEENEDILEDIVLTLTLFEDREMIEERLKTYAHLFDDKVMKQLKRRRYTGWGRLSRKLINGIRDKQSGKTILDFLKSDGFANRNFMQLIHDDSLTFKEDIQKAQVSGQGDSLHEHIANLAGSPAIKKGILQTVKVVDELVKVMGRHKPENIVIEMARENQTTQKGQKNSRERMKRIEEGIKELGSQILKEHPVENTQLQNEKLYLYYLQNGRDMYVDQELDINRLSDYDVDAIVPQSFLKDDSIDNKVLTRSDKNRGKSDNVPSEEVVKKMKNYWRQLLNAKLITQRKFDNLTKAERGGLSELDKAGFIKRQLVETRQITKHVAQILDSRMNTKYDENDKLIREVKVITLKSKLVSDFRKDFQFYKVREINNYHHAHDAYLNAVVGTALIKKYPKLESEFVYGDYKVYDVRKMIAKSEQEIGKATAKYFFYSNIMNFFKTEITLANGEIRKRPLIETNGETGEIVWDKGRDFATVRKVLSMPQVNIVKKTEVQTGGFSKESILPKRNSDKLIARKKDWDPKKYGGFDSPTVAYSVLVVAKVEKGKSKKLKSVKELLGITIMERSSFEKNPIDFLEAKGYKEVKKDLIIKLPKYSLFELENGRKRMLASAGELQKGNELALPSKYVNFLYLASHYEKLKGSPEDNEQKQLFVEQHKHYLDEIIEQISEFSKRVILADANLDKVLSAYNKHRDKPIREQAENIIHLFTLTNLGAPAAFKYFDTTIDRKRYTSTKEVLDATLIHQSITGLYETRIDLSQLGGDSGGSSGGSSGSETPGTSESATPESSGGSSGGSSTIEVQRWEDKFEKKPGVPVYVPSVEARKVGGKILQAVRNKWIPPLYFYHLRTGGHLKAARLHLKSDFFAVVDIKQFFQSTSRSMITRDLKSYFTPSQAREISTFSTVRNLSHSPHKHVLPFGFVQSPILATLCLDKSPYGSLLRRLNKHHDLKLSVFMDDVIISSNNLAQLQAAYDEALVAMRKSGYQANMSKTQAPSSKISVFNLTLSKGVMKVTSQKMSDFLIDFYSSNYEPHRIGVKNYVEAVNPGQAKLFKLSGGSKRTADGSEFEPKKKRKV

SEQ ID NO: 1351 - protein, 1696 aa, synthetic construct
MKRTADGSEFESPKKKRKVDKKYSIGLDIGTNSVGWAVITDEYKVPSKKFKVLGNTDRHSIKKNLIGALLFDSGETAEATRLKRTARRRYTRRKNRICYLQEIFSNEMAKVDDSFFHRLEESFLVEEDKKHERHPIFGNIVDEVAYHEKYPTIYHLRKKLVDSTDKADLRLIYLALAHMIKFRGHFLIEGDLNPDNSDVDKLFIQLVQTYNQLFEENPINASGVDAKAILSARLSKSRRLENLIAQLPGEKKNGLFGNLIALSLGLTPNFKSNFDLAEDAKLQLSKDTYDDDLDNLLAQIGDQYADLFLAAKNLSDAILLSDILRVNTEITKAPLSASMIKRYDEHHQDLTLLKALVRQQLPEKYKEIFFDQSKNGYAGYIDGGASQEEFYKFIKPILEKMDGTEELLVKLNREDLLRKQRTFDNGSIPHQIHLGELHAILRRQEDFYPFLKDNREKIEKILTFRIPYYVGPLARGNSRFAWMTRKSEETITPWNFEEVVDKGASAQSFIERMTNFDKNLPNEKVLPKHSLLYEYFTVYNELTKVKYVTEGMRKPAFLSGEQKKAIVDLLFKTNRKVTVKQLKEDYFKKIECFDSVEISGVEDRFNASLGTYHDLLKIIKDKDFLDNEENEDILEDIVLTLTLFEDREMIEERLKTYAHLFDDKVMKQLKRRRYTGWGRLSRKLINGIRDKQSGKTILDFLKSDGFANRNFMQLIHDDSLTFKEDIQKAQVSGQGDSLHEHIANLAGSPAIKKGILQTVKVVDELVKVMGRHKPENIVIEMARENQTTQKGQKNSRERMKRIEEGIKELGSQILKEHPVENTQLQNEKLYLYYLQNGRDMYVDQELDINRLSDYDVDAIVPQSFLKDDSIDNKVLTRSDKNRGKSDNVPSEEVVKKMKNYWRQLLNAKLITQRKFDNLTKAERGGLSELDKAGFIKRQLVETRQITKHVAQILDSRMNTKYDENDKLIREVKVITLKSKLVSDFRKDFQFYKVREINNYHHAHDAYLNAVVGTALIKKYPKLESEFVYGDYKVYDVRKMIAKSEQEIGKATAKYFFYSNIMNFFKTEITLANGEIRKRPLIETNGETGEIVWDKGRDFATVRKVLSMPQVNIVKKTEVQTGGFSKESILPKRNSDKLIARKKDWDPKKYGGFDSPTVAYSVLVVAKVEKGKSKKLKSVKELLGITIMERSSFEKNPIDFLEAKGYKEVKKDLIIKLPKYSLFELENGRKRMLASAGELQKGNELALPSKYVNFLYLASHYEKLKGSPEDNEQKQLFVEQHKHYLDEIIEQISEFSKRVILADANLDKVLSAYNKHRDKPIREQAENIIHLFTLTNLGAPAAFKYFDTTIDRKRYTSTKEVLDATLIHQSITGLYETRIDLSQLGGDSGGSSGGSSGSETPGTSESATPESSGGSSGGSSTIEVQRWEDKFEIKPGVWVYVPSVEARKVGGKILQAVRNKWIPPLYFYHLRTGGHLKAARLHLKSDFFAVVDIKQFFQSTSRSRITRDLKSYFTYSQAREISTFSTVRNLSHSPHKHVLPFGFVQSPILATLCLDKSYFGSLLRRLNKHHDLKLSVFMDDVIISSNNLAQLQAAYDEALVAMRKSRYQANMSKTQAPSSKISVFNLTLSKGVMKVTSQKMSDFLIDFYSSNYEPHRIGVKNYVEAVNPGQAKLFKLSGGSKRTADGSEFEPKKKRKV

SEQ ID NO: 1352 - protein, 1696 aa, synthetic construct
MKRTADGSEFESPKKKRKVDKKYSIGLDIGTNSVGWAVITDEYKVPSKKFKVLGNTDRHSIKKNLIGALLFDSGETAEATRLKRTARRRYTRRKNRICYLQEIFSNEMAKVDDSFFHRLEESFLVEEDKKHERHPIFGNIVDEVAYHEKYPTIYHLRKKLVDSTDKADLRLIYLALAHMIKFRGHFLIEGDLNPDNSDVDKLFIQLVQTYNQLFEENPINASGVDAKAILSARLSKSRRLENLIAQLPGEKKNGLFGNLIALSLGLTPNFKSNFDLAEDAKLQLSKDTYDDDLDNLLAQIGDQYADLFLAAKNLSDAILLSDILRVNTEITKAPLSASMIKRYDEHHQDLTLLKALVRQQLPEKYKEIFFDQSKNGYAGYIDGGASQEEFYKFIKPILEKMDGTEELLVKLNREDLLRKQRTFDNGSIPHQIHLGELHAILRRQEDFYPFLKDNREKIEKILTFRIPYYVGPLARGNSRFAWMTRKSEETITPWNFEEVVDKGASAQSFIERMTNFDKNLPNEKVLPKHSLLYEYFTVYNELTKVKYVTEGMRKPAFLSGEQKKAIVDLLFKTNRKVTVKQLKEDYFKKIECFDSVEISGVEDRFNASLGTYHDLLKIIKDKDFLDNEENEDILEDIVLTLTLFEDREMIEERLKTYAHLFDDKVMKQLKRRRYTGWGRLSRKLINGIRDKQSGKTILDFLKSDGFANRNFMQLIHDDSLTFKEDIQKAQVSGQGDSLHEHIANLAGSPAIKKGILQTVKVVDELVKVMGRHKPENIVIEMARENQTTQKGQKNSRERMKRIEEGIKELGSQILKEHPVENTQLQNEKLYLYYLQNGRDMYVDQELDINRLSDYDVDAIVPQSFLKDDSIDNKVLTRSDKNRGKSDNVPSEEVVKKMKNYWRQLLNAKLITQRKFDNLTKAERGGLSELDKAGFIKRQLVETRQITKHVAQILDSRMNTKYDENDKLIREVKVITLKSKLVSDFRKDFQFYKVREINNYHHAHDAYLNAVVGTALIKKYPKLESEFVYGDYKVYDVRKMIAKSEQEIGKATAKYFFYSNIMNFFKTEITLANGEIRKRPLIETNGETGEIVWDKGRDFATVRKVLSMPQVNIVKKTEVQTGGFSKESILPKRNSDKLIARKKDWDPKKYGGFDSPTVAYSVLVVAKVEKGKSKKLKSVKELLGITIMERSSFEKNPIDFLEAKGYKEVKKDLIIKLPKYSLFELENGRKRMLASAGELQKGNELALPSKYVNFLYLASHYEKLKGSPEDNEQKQLFVEQHKHYLDEIIEQISEFSKRVILADANLDKVLSAYNKHRDKPIREQAENIIHLFTLTNLGAPAAFKYFDTTIDRKRYTSTKEVLDATLIHQSITGLYETRIDLSQLGGDSGGSSGGSSGSETPGTSESATPESSGGSSGGSSTIEVQRWEDKFEKKPGVPVYVPSVEARKVGGKILQAVRNKWIPPLYFYHLRTGGHLKAARLHLKSDFFAVVDIKQFFQSTSRSLITRDLLSYFKYSQAREISTFSTVRNLSHSPHKHVLPLGFVQSPILATLCLDKSYFGSLLRRLNKHHDLKLSVFMDDVIISSNNLAQLQAAYDEALVAMRKSGYQANMSKTQAPSSKISVFNLTLSKGVMKVTSQKMSDFLIDFYSSNYEPHRIGVKNYVEAVNPGQAKLFKLSGGSKRTADGSEFEPKKKRKV

SEQ ID NO: 1353 - protein, 1696 aa, synthetic construct
MKRTADGSEFESPKKKRKVDKKYSIGLDIGTNSVGWAVITDEYKVPSKKFKVLGNTDRHSIKKNLIGALLFDSGETAEATRLKRTARRRYTRRKNRICYLQEIFSNEMAKVDDSFFHRLEESFLVEEDKKHERHPIFGNIVDEVAYHEKYPTIYHLRKKLVDSTDKADLRLIYLALAHMIKFRGHFLIEGDLNPDNSDVDKLFIQLVQTYNQLFEENPINASGVDAKAILSARLSKSRRLENLIAQLPGEKKNGLFGNLIALSLGLTPNFKSNFDLAEDAKLQLSKDTYDDDLDNLLAQIGDQYADLFLAAKNLSDAILLSDILRVNTEITKAPLSASMIKRYDEHHQDLTLLKALVRQQLPEKYKEIFFDQSKNGYAGYIDGGASQEEFYKFIKPILEKMDGTEELLVKLNREDLLRKQRTFDNGSIPHQIHLGELHAILRRQEDFYPFLKDNREKIEKILTFRIPYYVGPLARGNSRFAWMTRKSEETITPWNFEEVVDKGASAQSFIERMTNFDKNLPNEKVLPKHSLLYEYFTVYNELTKVKYVTEGMRKPAFLSGEQKKAIVDLLFKTNRKVTVKQLKEDYFKKIECFDSVEISGVEDRFNASLGTYHDLLKIIKDKDFLDNEENEDILEDIVLTLTLFEDREMIEERLKTYAHLFDDKVMKQLKRRRYTGWGRLSRKLINGIRDKQSGKTILDFLKSDGFANRNFMQLIHDDSLTFKEDIQKAQVSGQGDSLHEHIANLAGSPAIKKGILQTVKVVDELVKVMGRHKPENIVIEMARENQTTQKGQKNSRERMKRIEEGIKELGSQILKEHPVENTQLQNEKLYLYYLQNGRDMYVDQELDINRLSDYDVDAIVPQSFLKDDSIDNKVLTRSDKNRGKSDNVPSEEVVKKMKNYWRQLLNAKLITQRKFDNLTKAERGGLSELDKAGFIKRQLVETRQITKHVAQILDSRMNTKYDENDKLIREVKVITLKSKLVSDFRKDFQFYKVREINNYHHAHDAYLNAVVGTALIKKYPKLESEFVYGDYKVYDVRKMIAKSEQEIGKATAKYFFYSNIMNFFKTEITLANGEIRKRPLIETNGETGEIVWDKGRDFATVRKVLSMPQVNIVKKTEVQTGGFSKESILPKRNSDKLIARKKDWDPKKYGGFDSPTVAYSVLVVAKVEKGKSKKLKSVKELLGITIMERSSFEKNPIDFLEAKGYKEVKKDLIIKLPKYSLFELENGRKRMLASAGELQKGNELALPSKYVNFLYLASHYEKLKGSPEDNEQKQLFVEQHKHYLDEIIEQISEFSKRVILADANLDKVLSAYNKHRDKPIREQAENIIHLFTLTNLGAPAAFKYFDTTIDRKRYTSTKEVLDATLIHQSITGLYETRIDLSQLGGDSGGSSGGSSGSETPGTSESATPESSGGSSGGSSTIEVQRWEDKFEKKPGVPVYVPSVEARKVGGKILQAVRNKWIPPLYFYHLRTGGHLKAARLHLKSDFFAVVDIKQFFQSTSRSRITRDLKSYFTYSQAREISTFSTVRNLSHSPHDHVLPLGFVQSPILATLCLDKSPFGSLLRRLNKHHDLKLSVFMDDVIISSNNLAQLQAAYDEALVAMRKSGYQANMSKTQAPSSKISVFNLTLSKGVMKVTSQKMSDFLIDFYSSNYEPHRIGVKNYVEAVNPGQAKLFKLSGGSKRTADGSEFEPKKKRKV

SEQ ID NO: 1354 - protein, 1696 aa, synthetic construct
MKRTADGSEFESPKKKRKVDKKYSIGLDIGTNSVGWAVITDEYKVPSKKFKVLGNTDRHSIKKNLIGALLFDSGETAEATRLKRTARRRYTRRKNRICYLQEIFSNEMAKVDDSFFHRLEESFLVEEDKKHERHPIFGNIVDEVAYHEKYPTIYHLRKKLVDSTDKADLRLIYLALAHMIKFRGHFLIEGDLNPDNSDVDKLFIQLVQTYNQLFEENPINASGVDAKAILSARLSKSRRLENLIAQLPGEKKNGLFGNLIALSLGLTPNFKSNFDLAEDAKLQLSKDTYDDDLDNLLAQIGDQYADLFLAAKNLSDAILLSDILRVNTEITKAPLSASMIKRYDEHHQDLTLLKALVRQQLPEKYKEIFFDQSKNGYAGYIDGGASQEEFYKFIKPILEKMDGTEELLVKLNREDLLRKQRTFDNGSIPHQIHLGELHAILRRQEDFYPFLKDNREKIEKILTFRIPYYVGPLARGNSRFAWMTRKSEETITPWNFEEVVDKGASAQSFIERMTNFDKNLPNEKVLPKHSLLYEYFTVYNELTKVKYVTEGMRKPAFLSGEQKKAIVDLLFKTNRKVTVKQLKEDYFKKIECFDSVEISGVEDRFNASLGTYHDLLKIIKDKDFLDNEENEDILEDIVLTLTLFEDREMIEERLKTYAHLFDDKVMKQLKRRRYTGWGRLSRKLINGIRDKQSGKTILDFLKSDGFANRNFMQLIHDDSLTFKEDIQKAQVSGQGDSLHEHIANLAGSPAIKKGILQTVKVVDELVKVMGRHKPENIVIEMARENQTTQKGQKNSRERMKRIEEGIKELGSQILKEHPVENTQLQNEKLYLYYLQNGRDMYVDQELDINRLSDYDVDAIVPQSFLKDDSIDNKVLTRSDKNRGKSDNVPSEEVVKKMKNYWRQLLNAKLITQRKFDNLTKAERGGLSELDKAGFIKRQLVETRQITKHVAQILDSRMNTKYDENDKLIREVKVITLKSKLVSDFRKDFQFYKVREINNYHHAHDAYLNAVVGTALIKKYPKLESEFVYGDYKVYDVRKMIAKSEQEIGKATAKYFFYSNIMNFFKTEITLANGEIRKRPLIETNGETGEIVWDKGRDFATVRKVLSMPQVNIVKKTEVQTGGFSKESILPKRNSDKLIARKKDWDPKKYGGFDSPTVAYSVLVVAKVEKGKSKKLKSVKELLGITIMERSSFEKNPIDFLEAKGYKEVKKDLIIKLPKYSLFELENGRKRMLASAGELQKGNELALPSKYVNFLYLASHYEKLKGSPEDNEQKQLFVEQHKHYLDEIIEQISEFSKRVILADANLDKVLSAYNKHRDKPIREQAENIIHLFTLTNLGAPAAFKYFDTTIDRKRYTSTKEVLDATLIHQSITGLYETRIDLSQLGGDSGGSSGGSSGSETPGTSESATPESSGGSSGGSSTIEVQRWEDKFEKKPGVWVYVPSVEARKVGGKILQAVRNKWIPPLYFYHLRTGGHLKAARLHLKSDFFAVVDIKQFFQSTNRSRITRDLSSYFTPSQAREISTFSTVRNLSHSPHDHVLPLGFVQSPILATLCLDKSPFGSLLRRLNKHHDLKLSVFMDDVIISSNNLAQLQAAYDEALVAMRKSGYQANMSKTQAPSSKISVFNLTLSKGVMKVTSQKMSDFLIDFNSSNYEPHRIGVKNYVEAVNPGQAKLFKLSGGSKRTADGSEFEPKKKRKV

SEQ ID NO: 1355 - protein, 1696 aa, synthetic construct
MKRTADGSEFESPKKKRKVDKKYSIGLDIGTNSVGWAVITDEYKVPSKKFKVLGNTDRHSIKKNLIGALLFDSGETAEATRLKRTARRRYTRRKNRICYLQEIFSNEMAKVDDSFFHRLEESFLVEEDKKHERHPIFGNIVDEVAYHEKYPTIYHLRKKLVDSTDKADLRLIYLALAHMIKFRGHFLIEGDLNPDNSDVDKLFIQLVQTYNQLFEENPINASGVDAKAILSARLSKSRRLENLIAQLPGEKKNGLFGNLIALSLGLTPNFKSNFDLAEDAKLQLSKDTYDDDLDNLLAQIGDQYADLFLAAKNLSDAILLSDILRVNTEITKAPLSASMIKRYDEHHQDLTLLKALVRQQLPEKYKEIFFDQSKNGYAGYIDGGASQEEFYKFIKPILEKMDGTEELLVKLNREDLLRKQRTFDNGSIPHQIHLGELHAILRRQEDFYPFLKDNREKIEKILTFRIPYYVGPLARGNSRFAWMTRKSEETITPWNFEEVVDKGASAQSFIERMTNFDKNLPNEKVLPKHSLLYEYFTVYNELTKVKYVTEGMRKPAFLSGEQKKAIVDLLFKTNRKVTVKQLKEDYFKKIECFDSVEISGVEDRFNASLGTYHDLLKIIKDKDFLDNEENEDILEDIVLTLTLFEDREMIEERLKTYAHLFDDKVMKQLKRRRYTGWGRLSRKLINGIRDKQSGKTILDFLKSDGFANRNFMQLIHDDSLTFKEDIQKAQVSGQGDSLHEHIANLAGSPAIKKGILQTVKVVDELVKVMGRHKPENIVIEMARENQTTQKGQKNSRERMKRIEEGIKELGSQILKEHPVENTQLQNEKLYLYYLQNGRDMYVDQELDINRLSDYDVDAIVPQSFLKDDSIDNKVLTRSDKNRGKSDNVPSEEVVKKMKNYWRQLLNAKLITQRKFDNLTKAERGGLSELDKAGFIKRQLVETRQITKHVAQILDSRMNTKYDENDKLIREVKVITLKSKLVSDFRKDFQFYKVREINNYHHAHDAYLNAVVGTALIKKYPKLESEFVYGDYKVYDVRKMIAKSEQEIGKATAKYFFYSNIMNFFKTEITLANGEIRKRPLIETNGETGEIVWDKGRDFATVRKVLSMPQVNIVKKTEVQTGGFSKESILPKRNSDKLIARKKDWDPKKYGGFDSPTVAYSVLVVAKVEKGKSKKLKSVKELLGITIMERSSFEKNPIDFLEAKGYKEVKKDLIIKLPKYSLFELENGRKRMLASAGELQKGNELALPSKYVNFLYLASHYEKLKGSPEDNEQKQLFVEQHKHYLDEIIEQISEFSKRVILADANLDKVLSAYNKHRDKPIREQAENIIHLFTLTNLGAPAAFKYFDTTIDRKRYTSTKEVLDATLIHQSITGLYETRIDLSQLGGDSGGSSGGSSGSETPGTSESATPESSGGSSGGSSTIEVQRWEDKFEKKPGVWVYVPSVEARKVGGKILQAVRNKWIPPLYFYHLRTGGHLKAARLHLKSDFFAVVDIKQFFQSTDRERITEDLKSYFTYSQAREISTFSTVRNLSHSPHKHVLPLGFVQSPILATLCLDKSYFGSLLRRLNKHHDLKLSVFMDDVIISSNNLAQLQAAYDEALVAMRKSGYQANMSKTQAPSSKISVFNLTLSKGVMKVTSQKMSDFLIDFNSSNYEPHRIGVKNYVEAVNPGQAKLFKLSGGSKRTADGSEFEPKKKRKV

SEQ ID NO: 1356 - protein, 1696 aa, synthetic construct
MKRTADGSEFESPKKKRKVDKKYSIGLDIGTNSVGWAVITDEYKVPSKKFKVLGNTDRHSIKKNLIGALLFDSGETAEATRLKRTARRRYTRRKNRICYLQEIFSNEMAKVDDSFFHRLEESFLVEEDKKHERHPIFGNIVDEVAYHEKYPTIYHLRKKLVDSTDKADLRLIYLALAHMIKFRGHFLIEGDLNPDNSDVDKLFIQLVQTYNQLFEENPINASGVDAKAILSARLSKSRRLENLIAQLPGEKKNGLFGNLIALSLGLTPNFKSNFDLAEDAKLQLSKDTYDDDLDNLLAQIGDQYADLFLAAKNLSDAILLSDILRVNTEITKAPLSASMIKRYDEHHQDLTLLKALVRQQLPEKYKEIFFDQSKNGYAGYIDGGASQEEFYKFIKPILEKMDGTEELLVKLNREDLLRKQRTFDNGSIPHQIHLGELHAILRRQEDFYPFLKDNREKIEKILTFRIPYYVGPLARGNSRFAWMTRKSEETITPWNFEEVVDKGASAQSFIERMTNFDKNLPNEKVLPKHSLLYEYFTVYNELTKVKYVTEGMRKPAFLSGEQKKAIVDLLFKTNRKVTVKQLKEDYFKKIECFDSVEISGVEDRFNASLGTYHDLLKIIKDKDFLDNEENEDILEDIVLTLTLFEDREMIEERLKTYAHLFDDKVMKQLKRRRYTGWGRLSRKLINGIRDKQSGKTILDFLKSDGFANRNFMQLIHDDSLTFKEDIQKAQVSGQGDSLHEHIANLAGSPAIKKGILQTVKVVDELVKVMGRHKPENIVIEMARENQTTQKGQKNSRERMKRIEEGIKELGSQILKEHPVENTQLQNEKLYLYYLQNGRDMYVDQELDINRLSDYDVDAIVPQSFLKDDSIDNKVLTRSDKNRGKSDNVPSEEVVKKMKNYWRQLLNAKLITQRKFDNLTKAERGGLSELDKAGFIKRQLVETRQITKHVAQILDSRMNTKYDENDKLIREVKVITLKSKLVSDFRKDFQFYKVREINNYHHAHDAYLNAVVGTALIKKYPKLESEFVYGDYKVYDVRKMIAKSEQEIGKATAKYFFYSNIMNFFKTEITLANGEIRKRPLIETNGETGEIVWDKGRDFATVRKVLSMPQVNIVKKTEVQTGGFSKESILPKRNSDKLIARKKDWDPKKYGGFDSPTVAYSVLVVAKVEKGKSKKLKSVKELLGITIMERSSFEKNPIDFLEAKGYKEVKKDLIIKLPKYSLFELENGRKRMLASAGELQKGNELALPSKYVNFLYLASHYEKLKGSPEDNEQKQLFVEQHKHYLDEIIEQISEFSKRVILADANLDKVLSAYNKHRDKPIREQAENIIHLFTLTNLGAPAAFKYFDTTIDRKRYTSTKEVLDATLIHQSITGLYETRIDLSQLGGDSGGSSGGSSGSETPGTSESATPESSGGSSGGSSTIEVQRWEDKFEKKPGVWVYVPSVEARKVGGKILQAVRNKWIPPLYFYHLRTGGHLKAARLHLKSDFFAVVDIKQFFQSTSRDMITRDLLSYFKYSQAREISTFSTVRNLSHSPHKHVLPLGFVQSPILATLCLDKSYFGSLLRRLNKHHDLKLSVFMDDVIISSNNLAQLQAAYDEALVAMRKSGYQANMSKTQAPSSKISVFNLTLSKGVMKVTSQKMSDFLNDFYSSNYEPHRIGVKNYVEAVNPGQAKLFKLSGGSKRTADGSEFEPKKKRKV

SEQ ID NO: 1357 - protein, 1696 aa, synthetic construct
MKRTADGSEFESPKKKRKVDKKYSIGLDIGTNSVGWAVITDEYKVPSKKFKVLGNTDRHSIKKNLIGALLFDSGETAEATRLKRTARRRYTRRKNRICYLQEIFSNEMAKVDDSFFHRLEESFLVEEDKKHERHPIFGNIVDEVAYHEKYPTIYHLRKKLVDSTDKADLRLIYLALAHMIKFRGHFLIEGDLNPDNSDVDKLFIQLVQTYNQLFEENPINASGVDAKAILSARLSKSRRLENLIAQLPGEKKNGLFGNLIALSLGLTPNFKSNFDLAEDAKLQLSKDTYDDDLDNLLAQIGDQYADLFLAAKNLSDAILLSDILRVNTEITKAPLSASMIKRYDEHHQDLTLLKALVRQQLPEKYKEIFFDQSKNGYAGYIDGGASQEEFYKFIKPILEKMDGTEELLVKLNREDLLRKQRTFDNGSIPHQIHLGELHAILRRQEDFYPFLKDNREKIEKILTFRIPYYVGPLARGNSRFAWMTRKSEETITPWNFEEVVDKGASAQSFIERMTNFDKNLPNEKVLPKHSLLYEYFTVYNELTKVKYVTEGMRKPAFLSGEQKKAIVDLLFKTNRKVTVKQLKEDYFKKIECFDSVEISGVEDRFNASLGTYHDLLKIIKDKDFLDNEENEDILEDIVLTLTLFEDREMIEERLKTYAHLFDDKVMKQLKRRRYTGWGRLSRKLINGIRDKQSGKTILDFLKSDGFANRNFMQLIHDDSLTFKEDIQKAQVSGQGDSLHEHIANLAGSPAIKKGILQTVKVVDELVKVMGRHKPENIVIEMARENQTTQKGQKNSRERMKRIEEGIKELGSQILKEHPVENTQLQNEKLYLYYLQNGRDMYVDQELDINRLSDYDVDAIVPQSFLKDDSIDNKVLTRSDKNRGKSDNVPSEEVVKKMKNYWRQLLNAKLITQRKFDNLTKAERGGLSELDKAGFIKRQLVETRQITKHVAQILDSRMNTKYDENDKLIREVKVITLKSKLVSDFRKDFQFYKVREINNYHHAHDAYLNAVVGTALIKKYPKLESEFVYGDYKVYDVRKMIAKSEQEIGKATAKYFFYSNIMNFFKTEITLANGEIRKRPLIETNGETGEIVWDKGRDFATVRKVLSMPQVNIVKKTEVQTGGFSKESILPKRNSDKLIARKKDWDPKKYGGFDSPTVAYSVLVVAKVEKGKSKKLKSVKELLGITIMERSSFEKNPIDFLEAKGYKEVKKDLIIKLPKYSLFELENGRKRMLASAGELQKGNELALPSKYVNFLYLASHYEKLKGSPEDNEQKQLFVEQHKHYLDEIIEQISEFSKRVILADANLDKVLSAYNKHRDKPIREQAENIIHLFTLTNLGAPAAFKYFDTTIDRKRYTSTKEVLDATLIHQSITGLYETRIDLSQLGGDSGGSSGGSSGSETPGTSESATPESSGGSSGGSSTIEVQRWEDKFEKKPGVWVYVPSVEARKVGGKILQAVRNKWIPPLYFYHLRTGGHLKAARLHLKSDFFAVVDIKQFFQSTSRDRITQDLKSYFTYSQAREISTFSTVRNLSHSPHKHVLPLGFVQSPILATLCLDKSPFGSLLRRLNKHHDLKLSVFMDDVIISSNNLAQLQAAYDEALVAMRKSGYQANMSKTQAPSSKISVFNLTLSKGVMKVTSQKMSDFLNDFYSSNYEPHRIGVKNYVEAVNPGQAKLFKLSGGSKRTADGSEFEPKKKRKV

SEQ ID NO: 1358 - protein, 1696 aa, synthetic construct
MKRTADGSEFESPKKKRKVDKKYSIGLDIGTNSVGWAVITDEYKVPSKKFKVLGNTDRHSIKKNLIGALLFDSGETAEATRLKRTARRRYTRRKNRICYLQEIFSNEMAKVDDSFFHRLEESFLVEEDKKHERHPIFGNIVDEVAYHEKYPTIYHLRKKLVDSTDKADLRLIYLALAHMIKFRGHFLIEGDLNPDNSDVDKLFIQLVQTYNQLFEENPINASGVDAKAILSARLSKSRRLENLIAQLPGEKKNGLFGNLIALSLGLTPNFKSNFDLAEDAKLQLSKDTYDDDLDNLLAQIGDQYADLFLAAKNLSDAILLSDILRVNTEITKAPLSASMIKRYDEHHQDLTLLKALVRQQLPEKYKEIFFDQSKNGYAGYIDGGASQEEFYKFIKPILEKMDGTEELLVKLNREDLLRKQRTFDNGSIPHQIHLGELHAILRRQEDFYPFLKDNREKIEKILTFRIPYYVGPLARGNSRFAWMTRKSEETITPWNFEEVVDKGASAQSFIERMTNFDKNLPNEKVLPKHSLLYEYFTVYNELTKVKYVTEGMRKPAFLSGEQKKAIVDLLFKTNRKVTVKQLKEDYFKKIECFDSVEISGVEDRFNASLGTYHDLLKIIKDKDFLDNEENEDILEDIVLTLTLFEDREMIEERLKTYAHLFDDKVMKQLKRRRYTGWGRLSRKLINGIRDKQSGKTILDFLKSDGFANRNFMQLIHDDSLTFKEDIQKAQVSGQGDSLHEHIANLAGSPAIKKGILQTVKVVDELVKVMGRHKPENIVIEMARENQTTQKGQKNSRERMKRIEEGIKELGSQILKEHPVENTQLQNEKLYLYYLQNGRDMYVDQELDINRLSDYDVDAIVPQSFLKDDSIDNKVLTRSDKNRGKSDNVPSEEVVKKMKNYWRQLLNAKLITQRKFDNLTKAERGGLSELDKAGFIKRQLVETRQITKHVAQILDSRMNTKYDENDKLIREVKVITLKSKLVSDFRKDFQFYKVREINNYHHAHDAYLNAVVGTALIKKYPKLESEFVYGDYKVYDVRKMIAKSEQEIGKATAKYFFYSNIMNFFKTEITLANGEIRKRPLIETNGETGEIVWDKGRDFATVRKVLSMPQVNIVKKTEVQTGGFSKESILPKRNSDKLIARKKDWDPKKYGGFDSPTVAYSVLVVAKVEKGKSKKLKSVKELLGITIMERSSFEKNPIDFLEAKGYKEVKKDLIIKLPKYSLFELENGRKRMLASAGELQKGNELALPSKYVNFLYLASHYEKLKGSPEDNEQKQLFVEQHKHYLDEIIEQISEFSKRVILADANLDKVLSAYNKHRDKPIREQAENIIHLFTLTNLGAPAAFKYFDTTIDRKRYTSTKEVLDATLIHQSITGLYETRIDLSQLGGDSGGSSGGSSGSETPGTSESATPESSGGSSGGSSTIEVQRWEDKFEIKPGVWVYVPSVEARKVGGKILQAVRNKWIPPLYFYHLRTGGHLKAARLHLKSDFFAVVDIKQFFQSTSRSRIERDLKSYFTQSQAREISTFSTVRNLNHSPHKHVLPGGFVQSPILATLCLDKSPFGSLLRRLNKHHDLKLSVFMDDVIISSNNLAQLQAAYDEALVAMRKSGYQANMSKTQAPSSKISVFNLTLSKGVMKVTSQKMSDFLIDFYSSNYEPHRIGVKNYVEAVNPGQAKLFKLSGGSKRTADGSEFEPKKKRKV

SEQ ID NO: 1359 - protein, 1696 aa, synthetic construct
MKRTADGSEFESPKKKRKVDKKYSIGLDIGTNSVGWAVITDEYKVPSKKFKVLGNTDRHSIKKNLIGALLFDSGETAEATRLKRTARRRYTRRKNRICYLQEIFSNEMAKVDDSFFHRLEESFLVEEDKKHERHPIFGNIVDEVAYHEKYPTIYHLRKKLVDSTDKADLRLIYLALAHMIKFRGHFLIEGDLNPDNSDVDKLFIQLVQTYNQLFEENPINASGVDAKAILSARLSKSRRLENLIAQLPGEKKNGLFGNLIALSLGLTPNFKSNFDLAEDAKLQLSKDTYDDDLDNLLAQIGDQYADLFLAAKNLSDAILLSDILRVNTEITKAPLSASMIKRYDEHHQDLTLLKALVRQQLPEKYKEIFFDQSKNGYAGYIDGGASQEEFYKFIKPILEKMDGTEELLVKLNREDLLRKQRTFDNGSIPHQIHLGELHAILRRQEDFYPFLKDNREKIEKILTFRIPYYVGPLARGNSRFAWMTRKSEETITPWNFEEVVDKGASAQSFIERMTNFDKNLPNEKVLPKHSLLYEYFTVYNELTKVKYVTEGMRKPAFLSGEQKKAIVDLLFKTNRKVTVKQLKEDYFKKIECFDSVEISGVEDRFNASLGTYHDLLKIIKDKDFLDNEENEDILEDIVLTLTLFEDREMIEERLKTYAHLFDDKVMKQLKRRRYTGWGRLSRKLINGIRDKQSGKTILDFLKSDGFANRNFMQLIHDDSLTFKEDIQKAQVSGQGDSLHEHIANLAGSPAIKKGILQTVKVVDELVKVMGRHKPENIVIEMARENQTTQKGQKNSRERMKRIEEGIKELGSQILKEHPVENTQLQNEKLYLYYLQNGRDMYVDQELDINRLSDYDVDAIVPQSFLKDDSIDNKVLTRSDKNRGKSDNVPSEEVVKKMKNYWRQLLNAKLITQRKFDNLTKAERGGLSELDKAGFIKRQLVETRQITKHVAQILDSRMNTKYDENDKLIREVKVITLKSKLVSDFRKDFQFYKVREINNYHHAHDAYLNAVVGTALIKKYPKLESEFVYGDYKVYDVRKMIAKSEQEIGKATAKYFFYSNIMNFFKTEITLANGEIRKRPLIETNGETGEIVWDKGRDFATVRKVLSMPQVNIVKKTEVQTGGFSKESILPKRNSDKLIARKKDWDPKKYGGFDSPTVAYSVLVVAKVEKGKSKKLKSVKELLGITIMERSSFEKNPIDFLEAKGYKEVKKDLIIKLPKYSLFELENGRKRMLASAGELQKGNELALPSKYVNFLYLASHYEKLKGSPEDNEQKQLFVEQHKHYLDEIIEQISEFSKRVILADANLDKVLSAYNKHRDKPIREQAENIIHLFTLTNLGAPAAFKYFDTTIDRKRYTSTKEVLDATLIHQSITGLYETRIDLSQLGGDSGGSSGGSSGSETPGTSESATPESSGGSSGGSSTIEVQRWEDKFEIKPGVPVYVPSVEARKVGGKILQAVRNKWIPPLYFYHLRTGGHLKAARLHLKSDFFAVVDIKQFFQSTSRSRIERDLKSYFTQSQAREISTFSTVRNLNHSPHKHVLPGGFVQSPILATLCLDKSPFGSLLRRLNKHHDLKLSVFMDDVIISSNNLAQLQAAYDEALVAMRKSGYQANMSKTQAPSSKISVFNLTLSKGVMKVTSQKMSDFLIDFNSSNYEPHRIGVKNYVEAVNPGQAKLFKLSGGSKRTADGSEFEPKKKRKV

SEQ ID NO: 1360 - protein, 1696 aa, synthetic construct
MKRTADGSEFESPKKKRKVDKKYSIGLDIGTNSVGWAVITDEYKVPSKKFKVLGNTDRHSIKKNLIGALLFDSGETAEATRLKRTARRRYTRRKNRICYLQEIFSNEMAKVDDSFFHRLEESFLVEEDKKHERHPIFGNIVDEVAYHEKYPTIYHLRKKLVDSTDKADLRLIYLALAHMIKFRGHFLIEGDLNPDNSDVDKLFIQLVQTYNQLFEENPINASGVDAKAILSARLSKSRRLENLIAQLPGEKKNGLFGNLIALSLGLTPNFKSNFDLAEDAKLQLSKDTYDDDLDNLLAQIGDQYADLFLAAKNLSDAILLSDILRVNTEITKAPLSASMIKRYDEHHQDLTLLKALVRQQLPEKYKEIFFDQSKNGYAGYIDGGASQEEFYKFIKPILEKMDGTEELLVKLNREDLLRKQRTFDNGSIPHQIHLGELHAILRRQEDFYPFLKDNREKIEKILTFRIPYYVGPLARGNSRFAWMTRKSEETITPWNFEEVVDKGASAQSFIERMTNFDKNLPNEKVLPKHSLLYEYFTVYNELTKVKYVTEGMRKPAFLSGEQKKAIVDLLFKTNRKVTVKQLKEDYFKKIECFDSVEISGVEDRFNASLGTYHDLLKIIKDKDFLDNEENEDILEDIVLTLTLFEDREMIEERLKTYAHLFDDKVMKQLKRRRYTGWGRLSRKLINGIRDKQSGKTILDFLKSDGFANRNFMQLIHDDSLTFKEDIQKAQVSGQGDSLHEHIANLAGSPAIKKGILQTVKVVDELVKVMGRHKPENIVIEMARENQTTQKGQKNSRERMKRIEEGIKELGSQILKEHPVENTQLQNEKLYLYYLQNGRDMYVDQELDINRLSDYDVDAIVPQSFLKDDSIDNKVLTRSDKNRGKSDNVPSEEVVKKMKNYWRQLLNAKLITQRKFDNLTKAERGGLSELDKAGFIKRQLVETRQITKHVAQILDSRMNTKYDENDKLIREVKVITLKSKLVSDFRKDFQFYKVREINNYHHAHDAYLNAVVGTALIKKYPKLESEFVYGDYKVYDVRKMIAKSEQEIGKATAKYFFYSNIMNFFKTEITLANGEIRKRPLIETNGETGEIVWDKGRDFATVRKVLSMPQVNIVKKTEVQTGGFSKESILPKRNSDKLIARKKDWDPKKYGGFDSPTVAYSVLVVAKVEKGKSKKLKSVKELLGITIMERSSFEKNPIDFLEAKGYKEVKKDLIIKLPKYSLFELENGRKRMLASAGELQKGNELALPSKYVNFLYLASHYEKLKGSPEDNEQKQLFVEQHKHYLDEIIEQISEFSKRVILADANLDKVLSAYNKHRDKPIREQAENIIHLFTLTNLGAPAAFKYFDTTIDRKRYTSTKEVLDATLIHQSITGLYETRIDLSQLGGDSGGSSGGSSGSETPGTSESATPESSGGSSGGSSTIEVQRWEDKFEIKPGVPVYVPSVEARKVGGKILQAVRNKWIPPLYFYHLRTGGHLKAARLHLKSDFFAVVDIKQFFQSTCRSRITQDLKSYFTPSQAREISTFSTVRNLSHSPHKHVLPFGFVQSPILATLCLDKSPFGSLLRRLNKHHDLKLSVFMDDVIISSNNLAQLQAAYDEALVAMRKSGYQANMSKTQAPSSKISVFNLTLSKGVMKVTSQKMSDFLIDFNSSNYEPHRIGVKNYVEAVNPGQAKLFKLSGGSKRTADGSEFEPKKKRKV

SEQ ID NO: 1361 - protein, 1696 aa, synthetic construct
MKRTADGSEFESPKKKRKVDKKYSIGLDIGTNSVGWAVITDEYKVPSKKFKVLGNTDRHSIKKNLIGALLFDSGETAEATRLKRTARRRYTRRKNRICYLQEIFSNEMAKVDDSFFHRLEESFLVEEDKKHERHPIFGNIVDEVAYHEKYPTIYHLRKKLVDSTDKADLRLIYLALAHMIKFRGHFLIEGDLNPDNSDVDKLFIQLVQTYNQLFEENPINASGVDAKAILSARLSKSRRLENLIAQLPGEKKNGLFGNLIALSLGLTPNFKSNFDLAEDAKLQLSKDTYDDDLDNLLAQIGDQYADLFLAAKNLSDAILLSDILRVNTEITKAPLSASMIKRYDEHHQDLTLLKALVRQQLPEKYKEIFFDQSKNGYAGYIDGGASQEEFYKFIKPILEKMDGTEELLVKLNREDLLRKQRTFDNGSIPHQIHLGELHAILRRQEDFYPFLKDNREKIEKILTFRIPYYVGPLARGNSRFAWMTRKSEETITPWNFEEVVDKGASAQSFIERMTNFDKNLPNEKVLPKHSLLYEYFTVYNELTKVKYVTEGMRKPAFLSGEQKKAIVDLLFKTNRKVTVKQLKEDYFKKIECFDSVEISGVEDRFNASLGTYHDLLKIIKDKDFLDNEENEDILEDIVLTLTLFEDREMIEERLKTYAHLFDDKVMKQLKRRRYTGWGRLSRKLINGIRDKQSGKTILDFLKSDGFANRNFMQLIHDDSLTFKEDIQKAQVSGQGDSLHEHIANLAGSPAIKKGILQTVKVVDELVKVMGRHKPENIVIEMARENQTTQKGQKNSRERMKRIEEGIKELGSQILKEHPVENTQLQNEKLYLYYLQNGRDMYVDQELDINRLSDYDVDAIVPQSFLKDDSIDNKVLTRSDKNRGKSDNVPSEEVVKKMKNYWRQLLNAKLITQRKFDNLTKAERGGLSELDKAGFIKRQLVETRQITKHVAQILDSRMNTKYDENDKLIREVKVITLKSKLVSDFRKDFQFYKVREINNYHHAHDAYLNAVVGTALIKKYPKLESEFVYGDYKVYDVRKMIAKSEQEIGKATAKYFFYSNIMNFFKTEITLANGEIRKRPLIETNGETGEIVWDKGRDFATVRKVLSMPQVNIVKKTEVQTGGFSKESILPKRNSDKLIARKKDWDPKKYGGFDSPTVAYSVLVVAKVEKGKSKKLKSVKELLGITIMERSSFEKNPIDFLEAKGYKEVKKDLIIKLPKYSLFELENGRKRMLASAGELQKGNELALPSKYVNFLYLASHYEKLKGSPEDNEQKQLFVEQHKHYLDEIIEQISEFSKRVILADANLDKVLSAYNKHRDKPIREQAENIIHLFTLTNLGAPAAFKYFDTTIDRKRYTSTKEVLDATLIHQSITGLYETRIDLSQLGGDSGGSSGGSSGSETPGTSESATPESSGGSSGGSSTIEVQRWEDKFEIKPGVPVYVPSVEARKVGGKILQAVRNKWIPPLYFYHLRTGGHLKAARLHLKSDFFAVVDIKQFFQSTDRSRIERDLKSYFTYSQAREISTFSTVRNLSHSPHKHVLPLGFVQSPILATLCLDKSYFGSLLRRLNKHHDLKLSVFMDDVIISSNNLAQLQAAYDEALVAMRKSGYQANMSKTQAPSSKISVFNLTLSKGVMKVTSQKMSDFLNDFYSSNYEPHRIGVKNYVEAVNPGQAKLFKLSGGSKRTADGSEFEPKKKRKV

SEQ ID NO: 1362 - protein, 1696 aa, synthetic construct
MKRTADGSEFESPKKKRKVDKKYSIGLDIGTNSVGWAVITDEYKVPSKKFKVLGNTDRHSIKKNLIGALLFDSGETAEATRLKRTARRRYTRRKNRICYLQEIFSNEMAKVDDSFFHRLEESFLVEEDKKHERHPIFGNIVDEVAYHEKYPTIYHLRKKLVDSTDKADLRLIYLALAHMIKFRGHFLIEGDLNPDNSDVDKLFIQLVQTYNQLFEENPINASGVDAKAILSARLSKSRRLENLIAQLPGEKKNGLFGNLIALSLGLTPNFKSNFDLAEDAKLQLSKDTYDDDLDNLLAQIGDQYADLFLAAKNLSDAILLSDILRVNTEITKAPLSASMIKRYDEHHQDLTLLKALVRQQLPEKYKEIFFDQSKNGYAGYIDGGASQEEFYKFIKPILEKMDGTEELLVKLNREDLLRKQRTFDNGSIPHQIHLGELHAILRRQEDFYPFLKDNREKIEKILTFRIPYYVGPLARGNSRFAWMTRKSEETITPWNFEEVVDKGASAQSFIERMTNFDKNLPNEKVLPKHSLLYEYFTVYNELTKVKYVTEGMRKPAFLSGEQKKAIVDLLFKTNRKVTVKQLKEDYFKKIECFDSVEISGVEDRFNASLGTYHDLLKIIKDKDFLDNEENEDILEDIVLTLTLFEDREMIEERLKTYAHLFDDKVMKQLKRRRYTGWGRLSRKLINGIRDKQSGKTILDFLKSDGFANRNFMQLIHDDSLTFKEDIQKAQVSGQGDSLHEHIANLAGSPAIKKGILQTVKVVDELVKVMGRHKPENIVIEMARENQTTQKGQKNSRERMKRIEEGIKELGSQILKEHPVENTQLQNEKLYLYYLQNGRDMYVDQELDINRLSDYDVDAIVPQSFLKDDSIDNKVLTRSDKNRGKSDNVPSEEVVKKMKNYWRQLLNAKLITQRKFDNLTKAERGGLSELDKAGFIKRQLVETRQITKHVAQILDSRMNTKYDENDKLIREVKVITLKSKLVSDFRKDFQFYKVREINNYHHAHDAYLNAVVGTALIKKYPKLESEFVYGDYKVYDVRKMIAKSEQEIGKATAKYFFYSNIMNFFKTEITLANGEIRKRPLIETNGETGEIVWDKGRDFATVRKVLSMPQVNIVKKTEVQTGGFSKESILPKRNSDKLIARKKDWDPKKYGGFDSPTVAYSVLVVAKVEKGKSKKLKSVKELLGITIMERSSFEKNPIDFLEAKGYKEVKKDLIIKLPKYSLFELENGRKRMLASAGELQKGNELALPSKYVNFLYLASHYEKLKGSPEDNEQKQLFVEQHKHYLDEIIEQISEFSKRVILADANLDKVLSAYNKHRDKPIREQAENIIHLFTLTNLGAPAAFKYFDTTIDRKRYTSTKEVLDATLIHQSITGLYETRIDLSQLGGDSGGSSGGSSGSETPGTSESATPESSGGSSGGSSTIEVQRWEDKFEIKPGVWVYVPSVEARKVGGKILQAVRNKWIPPLYFYHLRTGGHLKAARLHLKSDFFAVVDIKQFFQSTSRSRITRDLKSYFTYSQAQEISTFSTVRNLSHSPHKHVLPFGFVQSPILATLCLDKSYFGSLLRRLNKHHDLKLSVFMDDVIISSNNLAQLQAAYDEALVAMRKSGYQANMSKTQAPSSKISVFNLTLSKGVMKVTSQKMSDFLIDFYSSNYEPHRIGVKNYVEAVNPGQAKLFKLSGGSKRTADGSEFEPKKKRKV

SEQ ID NO: 1363 - protein, 1696 aa, synthetic construct
MKRTADGSEFESPKKKRKVDKKYSIGLDIGTNSVGWAVITDEYKVPSKKFKVLGNTDRHSIKKNLIGALLFDSGETAEATRLKRTARRRYTRRKNRICYLQEIFSNEMAKVDDSFFHRLEESFLVEEDKKHERHPIFGNIVDEVAYHEKYPTIYHLRKKLVDSTDKADLRLIYLALAHMIKFRGHFLIEGDLNPDNSDVDKLFIQLVQTYNQLFEENPINASGVDAKAILSARLSKSRRLENLIAQLPGEKKNGLFGNLIALSLGLTPNFKSNFDLAEDAKLQLSKDTYDDDLDNLLAQIGDQYADLFLAAKNLSDAILLSDILRVNTEITKAPLSASMIKRYDEHHQDLTLLKALVRQQLPEKYKEIFFDQSKNGYAGYIDGGASQEEFYKFIKPILEKMDGTEELLVKLNREDLLRKQRTFDNGSIPHQIHLGELHAILRRQEDFYPFLKDNREKIEKILTFRIPYYVGPLARGNSRFAWMTRKSEETITPWNFEEVVDKGASAQSFIERMTNFDKNLPNEKVLPKHSLLYEYFTVYNELTKVKYVTEGMRKPAFLSGEQKKAIVDLLFKTNRKVTVKQLKEDYFKKIECFDSVEISGVEDRFNASLGTYHDLLKIIKDKDFLDNEENEDILEDIVLTLTLFEDREMIEERLKTYAHLFDDKVMKQLKRRRYTGWGRLSRKLINGIRDKQSGKTILDFLKSDGFANRNFMQLIHDDSLTFKEDIQKAQVSGQGDSLHEHIANLAGSPAIKKGILQTVKVVDELVKVMGRHKPENIVIEMARENQTTQKGQKNSRERMKRIEEGIKELGSQILKEHPVENTQLQNEKLYLYYLQNGRDMYVDQELDINRLSDYDVDAIVPQSFLKDDSIDNKVLTRSDKNRGKSDNVPSEEVVKKMKNYWRQLLNAKLITQRKFDNLTKAERGGLSELDKAGFIKRQLVETRQITKHVAQILDSRMNTKYDENDKLIREVKVITLKSKLVSDFRKDFQFYKVREINNYHHAHDAYLNAVVGTALIKKYPKLESEFVYGDYKVYDVRKMIAKSEQEIGKATAKYFFYSNIMNFFKTEITLANGEIRKRPLIETNGETGEIVWDKGRDFATVRKVLSMPQVNIVKKTEVQTGGFSKESILPKRNSDKLIARKKDWDPKKYGGFDSPTVAYSVLVVAKVEKGKSKKLKSVKELLGITIMERSSFEKNPIDFLEAKGYKEVKKDLIIKLPKYSLFELENGRKRMLASAGELQKGNELALPSKYVNFLYLASHYEKLKGSPEDNEQKQLFVEQHKHYLDEIIEQISEFSKRVILADANLDKVLSAYNKHRDKPIREQAENIIHLFTLTNLGAPAAFKYFDTTIDRKRYTSTKEVLDATLIHQSITGLYETRIDLSQLGGDSGGSSGGSSGSETPGTSESATPESSGGSSGGSSTIEVQRWEDKFEIKPGVPVYVPSVEARKVGGKILQAVRNKWIPPLYFYHLRTGGHLKAARLHLKSDFFAVVDIKQFFQSTNRARITRDLKSYFEYSQAEEISTFSTVRCLNHHPHDHVLPLGFVQSPILATLCLDKSPFGSLLRRLNKHHDLKLSVFMDDVIISSNNLAQLQAAYDEALVAMRKSGYQANMSKTQAPSSKISVFNLTLSKGVMKVTSQKMSDFLNDFYSSNYEPHRIGVKNYVEAVNPGQAKLFKLSGGSKRTADGSEFEPKKKRKV

SEQ ID NO: 1364 - protein, 1696 aa, synthetic construct
MKRTADGSEFESPKKKRKVDKKYSIGLDIGTNSVGWAVITDEYKVPSKKFKVLGNTDRHSIKKNLIGALLFDSGETAEATRLKRTARRRYTRRKNRICYLQEIFSNEMAKVDDSFFHRLEESFLVEEDKKHERHPIFGNIVDEVAYHEKYPTIYHLRKKLVDSTDKADLRLIYLALAHMIKFRGHFLIEGDLNPDNSDVDKLFIQLVQTYNQLFEENPINASGVDAKAILSARLSKSRRLENLIAQLPGEKKNGLFGNLIALSLGLTPNFKSNFDLAEDAKLQLSKDTYDDDLDNLLAQIGDQYADLFLAAKNLSDAILLSDILRVNTEITKAPLSASMIKRYDEHHQDLTLLKALVRQQLPEKYKEIFFDQSKNGYAGYIDGGASQEEFYKFIKPILEKMDGTEELLVKLNREDLLRKQRTFDNGSIPHQIHLGELHAILRRQEDFYPFLKDNREKIEKILTFRIPYYVGPLARGNSRFAWMTRKSEETITPWNFEEVVDKGASAQSFIERMTNFDKNLPNEKVLPKHSLLYEYFTVYNELTKVKYVTEGMRKPAFLSGEQKKAIVDLLFKTNRKVTVKQLKEDYFKKIECFDSVEISGVEDRFNASLGTYHDLLKIIKDKDFLDNEENEDILEDIVLTLTLFEDREMIEERLKTYAHLFDDKVMKQLKRRRYTGWGRLSRKLINGIRDKQSGKTILDFLKSDGFANRNFMQLIHDDSLTFKEDIQKAQVSGQGDSLHEHIANLAGSPAIKKGILQTVKVVDELVKVMGRHKPENIVIEMARENQTTQKGQKNSRERMKRIEEGIKELGSQILKEHPVENTQLQNEKLYLYYLQNGRDMYVDQELDINRLSDYDVDAIVPQSFLKDDSIDNKVLTRSDKNRGKSDNVPSEEVVKKMKNYWRQLLNAKLITQRKFDNLTKAERGGLSELDKAGFIKRQLVETRQITKHVAQILDSRMNTKYDENDKLIREVKVITLKSKLVSDFRKDFQFYKVREINNYHHAHDAYLNAVVGTALIKKYPKLESEFVYGDYKVYDVRKMIAKSEQEIGKATAKYFFYSNIMNFFKTEITLANGEIRKRPLIETNGETGEIVWDKGRDFATVRKVLSMPQVNIVKKTEVQTGGFSKESILPKRNSDKLIARKKDWDPKKYGGFDSPTVAYSVLVVAKVEKGKSKKLKSVKELLGITIMERSSFEKNPIDFLEAKGYKEVKKDLIIKLPKYSLFELENGRKRMLASAGELQKGNELALPSKYVNFLYLASHYEKLKGSPEDNEQKQLFVEQHKHYLDEIIEQISEFSKRVILADANLDKVLSAYNKHRDKPIREQAENIIHLFTLTNLGAPAAFKYFDTTIDRKRYTSTKEVLDATLIHQSITGLYETRIDLSQLGGDSGGSSGGSSGSETPGTSESATPESSGGSSGGSSTIEVQRWEDKFEKKPGVWVYVPSVEARKVGGKILQAVRNKWIPPLYFYHLRTGGHLKAARLHLKSDFFAVVDIKQFFQSTSRERITRDLKSYFTESQAREISTFSTVRCLSHSPHKHVLPLGFVQSPILATLCLDKSYFGSLLRRLNKHHDLKLSVFMDDVIISSNNLAQLQAAYDEALVAMRKSGYQANMSKTQAPSSKISVFNLTLSKGVMKVTSQKMSDFLIDFNSSNYEPHRIGVKNYVEAVNPGQAKLFKLSGGSKRTADGSEFEPKKKRKV

SEQ ID NO: 1365 - protein, 1696 aa, synthetic construct
MKRTADGSEFESPKKKRKVDKKYSIGLDIGTNSVGWAVITDEYKVPSKKFKVLGNTDRHSIKKNLIGALLFDSGETAEATRLKRTARRRYTRRKNRICYLQEIFSNEMAKVDDSFFHRLEESFLVEEDKKHERHPIFGNIVDEVAYHEKYPTIYHLRKKLVDSTDKADLRLIYLALAHMIKFRGHFLIEGDLNPDNSDVDKLFIQLVQTYNQLFEENPINASGVDAKAILSARLSKSRRLENLIAQLPGEKKNGLFGNLIALSLGLTPNFKSNFDLAEDAKLQLSKDTYDDDLDNLLAQIGDQYADLFLAAKNLSDAILLSDILRVNTEITKAPLSASMIKRYDEHHQDLTLLKALVRQQLPEKYKEIFFDQSKNGYAGYIDGGASQEEFYKFIKPILEKMDGTEELLVKLNREDLLRKQRTFDNGSIPHQIHLGELHAILRRQEDFYPFLKDNREKIEKILTFRIPYYVGPLARGNSRFAWMTRKSEETITPWNFEEVVDKGASAQSFIERMTNFDKNLPNEKVLPKHSLLYEYFTVYNELTKVKYVTEGMRKPAFLSGEQKKAIVDLLFKTNRKVTVKQLKEDYFKKIECFDSVEISGVEDRFNASLGTYHDLLKIIKDKDFLDNEENEDILEDIVLTLTLFEDREMIEERLKTYAHLFDDKVMKQLKRRRYTGWGRLSRKLINGIRDKQSGKTILDFLKSDGFANRNFMQLIHDDSLTFKEDIQKAQVSGQGDSLHEHIANLAGSPAIKKGILQTVKVVDELVKVMGRHKPENIVIEMARENQTTQKGQKNSRERMKRIEEGIKELGSQILKEHPVENTQLQNEKLYLYYLQNGRDMYVDQELDINRLSDYDVDAIVPQSFLKDDSIDNKVLTRSDKNRGKSDNVPSEEVVKKMKNYWRQLLNAKLITQRKFDNLTKAERGGLSELDKAGFIKRQLVETRQITKHVAQILDSRMNTKYDENDKLIREVKVITLKSKLVSDFRKDFQFYKVREINNYHHAHDAYLNAVVGTALIKKYPKLESEFVYGDYKVYDVRKMIAKSEQEIGKATAKYFFYSNIMNFFKTEITLANGEIRKRPLIETNGETGEIVWDKGRDFATVRKVLSMPQVNIVKKTEVQTGGFSKESILPKRNSDKLIARKKDWDPKKYGGFDSPTVAYSVLVVAKVEKGKSKKLKSVKELLGITIMERSSFEKNPIDFLEAKGYKEVKKDLIIKLPKYSLFELENGRKRMLASAGELQKGNELALPSKYVNFLYLASHYEKLKGSPEDNEQKQLFVEQHKHYLDEIIEQISEFSKRVILADANLDKVLSAYNKHRDKPIREQAENIIHLFTLTNLGAPAAFKYFDTTIDRKRYTSTKEVLDATLIHQSITGLYETRIDLSQLGGDSGGSSGGSSGSETPGTSESATPESSGGSSGGSSTIEVQRWEDKFEKKPGVWVYVPSVEARKVGGKILQAVRNKWIPPLYFYHLRTGGHLKAARLHLKSDFFAVVDIKQFFQSTSRSRITQDLLSYFKESQAREISTFSTVRNLSHSPHKHVLPLGFVQSPILATLCLDKSPFGSLLRRLNKHHDLKLSVFMDDVIISSNNLAQLQAAYDEALVAMRKSGYQANMSKTQAPSSKISVFNLTLSKGVMKVTSQKMSDFLNDFYSSNYEPHRIGVKNYVEAVNPGQAKLFKLSGGSKRTADGSEFEPKKKRKV

SEQ ID NO: 1366 - protein, 1696 aa, synthetic construct
MKRTADGSEFESPKKKRKVDKKYSIGLDIGTNSVGWAVITDEYKVPSKKFKVLGNTDRHSIKKNLIGALLFDSGETAEATRLKRTARRRYTRRKNRICYLQEIFSNEMAKVDDSFFHRLEESFLVEEDKKHERHPIFGNIVDEVAYHEKYPTIYHLRKKLVDSTDKADLRLIYLALAHMIKFRGHFLIEGDLNPDNSDVDKLFIQLVQTYNQLFEENPINASGVDAKAILSARLSKSRRLENLIAQLPGEKKNGLFGNLIALSLGLTPNFKSNFDLAEDAKLQLSKDTYDDDLDNLLAQIGDQYADLFLAAKNLSDAILLSDILRVNTEITKAPLSASMIKRYDEHHQDLTLLKALVRQQLPEKYKEIFFDQSKNGYAGYIDGGASQEEFYKFIKPILEKMDGTEELLVKLNREDLLRKQRTFDNGSIPHQIHLGELHAILRRQEDFYPFLKDNREKIEKILTFRIPYYVGPLARGNSRFAWMTRKSEETITPWNFEEVVDKGASAQSFIERMTNFDKNLPNEKVLPKHSLLYEYFTVYNELTKVKYVTEGMRKPAFLSGEQKKAIVDLLFKTNRKVTVKQLKEDYFKKIECFDSVEISGVEDRFNASLGTYHDLLKIIKDKDFLDNEENEDILEDIVLTLTLFEDREMIEERLKTYAHLFDDKVMKQLKRRRYTGWGRLSRKLINGIRDKQSGKTILDFLKSDGFANRNFMQLIHDDSLTFKEDIQKAQVSGQGDSLHEHIANLAGSPAIKKGILQTVKVVDELVKVMGRHKPENIVIEMARENQTTQKGQKNSRERMKRIEEGIKELGSQILKEHPVENTQLQNEKLYLYYLQNGRDMYVDQELDINRLSDYDVDAIVPQSFLKDDSIDNKVLTRSDKNRGKSDNVPSEEVVKKMKNYWRQLLNAKLITQRKFDNLTKAERGGLSELDKAGFIKRQLVETRQITKHVAQILDSRMNTKYDENDKLIREVKVITLKSKLVSDFRKDFQFYKVREINNYHHAHDAYLNAVVGTALIKKYPKLESEFVYGDYKVYDVRKMIAKSEQEIGKATAKYFFYSNIMNFFKTEITLANGEIRKRPLIETNGETGEIVWDKGRDFATVRKVLSMPQVNIVKKTEVQTGGFSKESILPKRNSDKLIARKKDWDPKKYGGFDSPTVAYSVLVVAKVEKGKSKKLKSVKELLGITIMERSSFEKNPIDFLEAKGYKEVKKDLIIKLPKYSLFELENGRKRMLASAGELQKGNELALPSKYVNFLYLASHYEKLKGSPEDNEQKQLFVEQHKHYLDEIIEQISEFSKRVILADANLDKVLSAYNKHRDKPIREQAENIIHLFTLTNLGAPAAFKYFDTTIDRKRYTSTKEVLDATLIHQSITGLYETRIDLSQLGGDSGGSSGGSSGSETPGTSESATPESSGGSSGGSSTIEVQRWEDKFEKKPGVWVYVPSVEARKVGGKILQAVRNKWIPPLYFYHLRTGGHLKAARLHLKSDFFAVVDIKQFFQSTNRSRITRDLKSYFTYSQAREISTFSTVRNLSHSPHDHVLPLGFVQSPILATLCLDKSPFGSLLRRLNKHHDLKLSVFMDDVIISSNNLAQLQAAYDEALVAMRKSGYQANMSKTQAPSSKISVFNLTLSKGVMKVTSQKMSDFLNDFYSSNYEPHRIGVKNYVEAVNPGQAKLFKLSGGSKRTADGSEFEPKKKRKV

SEQ ID NO: 1367 - protein, 1696 aa, synthetic construct
MKRTADGSEFESPKKKRKVDKKYSIGLDIGTNSVGWAVITDEYKVPSKKFKVLGNTDRHSIKKNLIGALLFDSGETAEATRLKRTARRRYTRRKNRICYLQEIFSNEMAKVDDSFFHRLEESFLVEEDKKHERHPIFGNIVDEVAYHEKYPTIYHLRKKLVDSTDKADLRLIYLALAHMIKFRGHFLIEGDLNPDNSDVDKLFIQLVQTYNQLFEENPINASGVDAKAILSARLSKSRRLENLIAQLPGEKKNGLFGNLIALSLGLTPNFKSNFDLAEDAKLQLSKDTYDDDLDNLLAQIGDQYADLFLAAKNLSDAILLSDILRVNTEITKAPLSASMIKRYDEHHQDLTLLKALVRQQLPEKYKEIFFDQSKNGYAGYIDGGASQEEFYKFIKPILEKMDGTEELLVKLNREDLLRKQRTFDNGSIPHQIHLGELHAILRRQEDFYPFLKDNREKIEKILTFRIPYYVGPLARGNSRFAWMTRKSEETITPWNFEEVVDKGASAQSFIERMTNFDKNLPNEKVLPKHSLLYEYFTVYNELTKVKYVTEGMRKPAFLSGEQKKAIVDLLFKTNRKVTVKQLKEDYFKKIECFDSVEISGVEDRFNASLGTYHDLLKIIKDKDFLDNEENEDILEDIVLTLTLFEDREMIEERLKTYAHLFDDKVMKQLKRRRYTGWGRLSRKLINGIRDKQSGKTILDFLKSDGFANRNFMQLIHDDSLTFKEDIQKAQVSGQGDSLHEHIANLAGSPAIKKGILQTVKVVDELVKVMGRHKPENIVIEMARENQTTQKGQKNSRERMKRIEEGIKELGSQILKEHPVENTQLQNEKLYLYYLQNGRDMYVDQELDINRLSDYDVDAIVPQSFLKDDSIDNKVLTRSDKNRGKSDNVPSEEVVKKMKNYWRQLLNAKLITQRKFDNLTKAERGGLSELDKAGFIKRQLVETRQITKHVAQILDSRMNTKYDENDKLIREVKVITLKSKLVSDFRKDFQFYKVREINNYHHAHDAYLNAVVGTALIKKYPKLESEFVYGDYKVYDVRKMIAKSEQEIGKATAKYFFYSNIMNFFKTEITLANGEIRKRPLIETNGETGEIVWDKGRDFATVRKVLSMPQVNIVKKTEVQTGGFSKESILPKRNSDKLIARKKDWDPKKYGGFDSPTVAYSVLVVAKVEKGKSKKLKSVKELLGITIMERSSFEKNPIDFLEAKGYKEVKKDLIIKLPKYSLFELENGRKRMLASAGELQKGNELALPSKYVNFLYLASHYEKLKGSPEDNEQKQLFVEQHKHYLDEIIEQISEFSKRVILADANLDKVLSAYNKHRDKPIREQAENIIHLFTLTNLGAPAAFKYFDTTIDRKRYTSTKEVLDATLIHQSITGLYETRIDLSQLGGDSGGSSGGSSGSETPGTSESATPESSGGSSGGSSTIEVQRWEDKFEIKPGVPVYVPSVEARKVGGKILQAVRNKWIPPLYFYHLRTGGHLKAARLHLKSDFFAVVDIKQFFQSTSRSMITRDLKSYFTPSQAREISTFSTVRNLSHSPHKHVLPFGFVQSPILATLCLDKSPYGSLLRRLNKHHDLKLSVFMDDVIISSNNLAQLQAAYDEALVAMRKSGYQANMSKTQAPSSKISVFNLTLSKGVMKVTSQKMSDFLIDFNSSNYEPHRIGVKNYVEAVNPGQAKLFKLSGGSKRTADGSEFEPKKKRKV

SEQ ID NO: 1368 - protein, 1696 aa, synthetic construct
MKRTADGSEFESPKKKRKVDKKYSIGLDIGTNSVGWAVITDEYKVPSKKFKVLGNTDRHSIKKNLIGALLFDSGETAEATRLKRTARRRYTRRKNRICYLQEIFSNEMAKVDDSFFHRLEESFLVEEDKKHERHPIFGNIVDEVAYHEKYPTIYHLRKKLVDSTDKADLRLIYLALAHMIKFRGHFLIEGDLNPDNSDVDKLFIQLVQTYNQLFEENPINASGVDAKAILSARLSKSRRLENLIAQLPGEKKNGLFGNLIALSLGLTPNFKSNFDLAEDAKLQLSKDTYDDDLDNLLAQIGDQYADLFLAAKNLSDAILLSDILRVNTEITKAPLSASMIKRYDEHHQDLTLLKALVRQQLPEKYKEIFFDQSKNGYAGYIDGGASQEEFYKFIKPILEKMDGTEELLVKLNREDLLRKQRTFDNGSIPHQIHLGELHAILRRQEDFYPFLKDNREKIEKILTFRIPYYVGPLARGNSRFAWMTRKSEETITPWNFEEVVDKGASAQSFIERMTNFDKNLPNEKVLPKHSLLYEYFTVYNELTKVKYVTEGMRKPAFLSGEQKKAIVDLLFKTNRKVTVKQLKEDYFKKIECFDSVEISGVEDRFNASLGTYHDLLKIIKDKDFLDNEENEDILEDIVLTLTLFEDREMIEERLKTYAHLFDDKVMKQLKRRRYTGWGRLSRKLINGIRDKQSGKTILDFLKSDGFANRNFMQLIHDDSLTFKEDIQKAQVSGQGDSLHEHIANLAGSPAIKKGILQTVKVVDELVKVMGRHKPENIVIEMARENQTTQKGQKNSRERMKRIEEGIKELGSQILKEHPVENTQLQNEKLYLYYLQNGRDMYVDQELDINRLSDYDVDAIVPQSFLKDDSIDNKVLTRSDKNRGKSDNVPSEEVVKKMKNYWRQLLNAKLITQRKFDNLTKAERGGLSELDKAGFIKRQLVETRQITKHVAQILDSRMNTKYDENDKLIREVKVITLKSKLVSDFRKDFQFYKVREINNYHHAHDAYLNAVVGTALIKKYPKLESEFVYGDYKVYDVRKMIAKSEQEIGKATAKYFFYSNIMNFFKTEITLANGEIRKRPLIETNGETGEIVWDKGRDFATVRKVLSMPQVNIVKKTEVQTGGFSKESILPKRNSDKLIARKKDWDPKKYGGFDSPTVAYSVLVVAKVEKGKSKKLKSVKELLGITIMERSSFEKNPIDFLEAKGYKEVKKDLIIKLPKYSLFELENGRKRMLASAGELQKGNELALPSKYVNFLYLASHYEKLKGSPEDNEQKQLFVEQHKHYLDEIIEQISEFSKRVILADANLDKVLSAYNKHRDKPIREQAENIIHLFTLTNLGAPAAFKYFDTTIDRKRYTSTKEVLDATLIHQSITGLYETRIDLSQLGGDSGGSSGGSSGSETPGTSESATPESSGGSSGGSSTIEVQRWEDKFEIKPGVPVYVPSVEARKVGGKILQAVRNKWIPPLYFYHLRTGGHLKAARLHLKSDFFAVVDIKQFFQSTSRSLITRDLLSYFKYSQAREISTFSTVRNLSHSPHKHVLPLGFVQSPILATLCLDKSYFGSLLRRLNKHHDLKLSVFMDDVIISSNNLAQLQAAYDEALVAMRKSGYQANMSKTQAPSSKISVFNLTLSKGVMKVTSQKMSDFLIDFNSSNYEPHRIGVKNYVEAVNPGQAKLFKLSGGSKRTADGSEFEPKKKRKV

SEQ ID NO: 1369 - protein, 1696 aa, synthetic construct
MKRTADGSEFESPKKKRKVDKKYSIGLDIGTNSVGWAVITDEYKVPSKKFKVLGNTDRHSIKKNLIGALLFDSGETAEATRLKRTARRRYTRRKNRICYLQEIFSNEMAKVDDSFFHRLEESFLVEEDKKHERHPIFGNIVDEVAYHEKYPTIYHLRKKLVDSTDKADLRLIYLALAHMIKFRGHFLIEGDLNPDNSDVDKLFIQLVQTYNQLFEENPINASGVDAKAILSARLSKSRRLENLIAQLPGEKKNGLFGNLIALSLGLTPNFKSNFDLAEDAKLQLSKDTYDDDLDNLLAQIGDQYADLFLAAKNLSDAILLSDILRVNTEITKAPLSASMIKRYDEHHQDLTLLKALVRQQLPEKYKEIFFDQSKNGYAGYIDGGASQEEFYKFIKPILEKMDGTEELLVKLNREDLLRKQRTFDNGSIPHQIHLGELHAILRRQEDFYPFLKDNREKIEKILTFRIPYYVGPLARGNSRFAWMTRKSEETITPWNFEEVVDKGASAQSFIERMTNFDKNLPNEKVLPKHSLLYEYFTVYNELTKVKYVTEGMRKPAFLSGEQKKAIVDLLFKTNRKVTVKQLKEDYFKKIECFDSVEISGVEDRFNASLGTYHDLLKIIKDKDFLDNEENEDILEDIVLTLTLFEDREMIEERLKTYAHLFDDKVMKQLKRRRYTGWGRLSRKLINGIRDKQSGKTILDFLKSDGFANRNFMQLIHDDSLTFKEDIQKAQVSGQGDSLHEHIANLAGSPAIKKGILQTVKVVDELVKVMGRHKPENIVIEMARENQTTQKGQKNSRERMKRIEEGIKELGSQILKEHPVENTQLQNEKLYLYYLQNGRDMYVDQELDINRLSDYDVDAIVPQSFLKDDSIDNKVLTRSDKNRGKSDNVPSEEVVKKMKNYWRQLLNAKLITQRKFDNLTKAERGGLSELDKAGFIKRQLVETRQITKHVAQILDSRMNTKYDENDKLIREVKVITLKSKLVSDFRKDFQFYKVREINNYHHAHDAYLNAVVGTALIKKYPKLESEFVYGDYKVYDVRKMIAKSEQEIGKATAKYFFYSNIMNFFKTEITLANGEIRKRPLIETNGETGEIVWDKGRDFATVRKVLSMPQVNIVKKTEVQTGGFSKESILPKRNSDKLIARKKDWDPKKYGGFDSPTVAYSVLVVAKVEKGKSKKLKSVKELLGITIMERSSFEKNPIDFLEAKGYKEVKKDLIIKLPKYSLFELENGRKRMLASAGELQKGNELALPSKYVNFLYLASHYEKLKGSPEDNEQKQLFVEQHKHYLDEIIEQISEFSKRVILADANLDKVLSAYNKHRDKPIREQAENIIHLFTLTNLGAPAAFKYFDTTIDRKRYTSTKEVLDATLIHQSITGLYETRIDLSQLGGDSGGSSGGSSGSETPGTSESATPESSGGSSGGSSTIEVQRWEDKFEIKPGVWVYVPSVEARKVGGKILQAVRNKWIPPLYFYHLRTGGHLKAARLHLKSDFFAVVDIKQFFQSTCRSRITQDLKSYFTPSQAREISTFSTVRNLSHSPHKHVLPFGFVQSPILATLCLDKSPFGSLLRRLNKHHDLKLSVFMDDVIISSNNLAQLQAAYDEALVAMRKSGYQANMSKTQAPSSKISVFNLTLSKGVMKVTSQKMSDFLIDFYSSNYEPHRIGVKNYVEAVNPGQAKLFKLSGGSKRTADGSEFEPKKKRKV

SEQ ID NO: 1370 - protein, 1696 aa, synthetic construct
MKRTADGSEFESPKKKRKVDKKYSIGLDIGTNSVGWAVITDEYKVPSKKFKVLGNTDRHSIKKNLIGALLFDSGETAEATRLKRTARRRYTRRKNRICYLQEIFSNEMAKVDDSFFHRLEESFLVEEDKKHERHPIFGNIVDEVAYHEKYPTIYHLRKKLVDSTDKADLRLIYLALAHMIKFRGHFLIEGDLNPDNSDVDKLFIQLVQTYNQLFEENPINASGVDAKAILSARLSKSRRLENLIAQLPGEKKNGLFGNLIALSLGLTPNFKSNFDLAEDAKLQLSKDTYDDDLDNLLAQIGDQYADLFLAAKNLSDAILLSDILRVNTEITKAPLSASMIKRYDEHHQDLTLLKALVRQQLPEKYKEIFFDQSKNGYAGYIDGGASQEEFYKFIKPILEKMDGTEELLVKLNREDLLRKQRTFDNGSIPHQIHLGELHAILRRQEDFYPFLKDNREKIEKILTFRIPYYVGPLARGNSRFAWMTRKSEETITPWNFEEVVDKGASAQSFIERMTNFDKNLPNEKVLPKHSLLYEYFTVYNELTKVKYVTEGMRKPAFLSGEQKKAIVDLLFKTNRKVTVKQLKEDYFKKIECFDSVEISGVEDRFNASLGTYHDLLKIIKDKDFLDNEENEDILEDIVLTLTLFEDREMIEERLKTYAHLFDDKVMKQLKRRRYTGWGRLSRKLINGIRDKQSGKTILDFLKSDGFANRNFMQLIHDDSLTFKEDIQKAQVSGQGDSLHEHIANLAGSPAIKKGILQTVKVVDELVKVMGRHKPENIVIEMARENQTTQKGQKNSRERMKRIEEGIKELGSQILKEHPVENTQLQNEKLYLYYLQNGRDMYVDQELDINRLSDYDVDAIVPQSFLKDDSIDNKVLTRSDKNRGKSDNVPSEEVVKKMKNYWRQLLNAKLITQRKFDNLTKAERGGLSELDKAGFIKRQLVETRQITKHVAQILDSRMNTKYDENDKLIREVKVITLKSKLVSDFRKDFQFYKVREINNYHHAHDAYLNAVVGTALIKKYPKLESEFVYGDYKVYDVRKMIAKSEQEIGKATAKYFFYSNIMNFFKTEITLANGEIRKRPLIETNGETGEIVWDKGRDFATVRKVLSMPQVNIVKKTEVQTGGFSKESILPKRNSDKLIARKKDWDPKKYGGFDSPTVAYSVLVVAKVEKGKSKKLKSVKELLGITIMERSSFEKNPIDFLEAKGYKEVKKDLIIKLPKYSLFELENGRKRMLASAGELQKGNELALPSKYVNFLYLASHYEKLKGSPEDNEQKQLFVEQHKHYLDEIIEQISEFSKRVILADANLDKVLSAYNKHRDKPIREQAENIIHLFTLTNLGAPAAFKYFDTTIDRKRYTSTKEVLDATLIHQSITGLYETRIDLSQLGGDSGGSSGGSSGSETPGTSESATPESSGGSSGGSSTIEVQRWEDKFEIKPGVPVYVPSVEARKVGGKILQAVRNKWIPPLYFYHLRTGGHLKAARLHLKSDFFAVVDIKQFFQSTSRSRITRDLKSYFTYSQAREISTFSTVRNLSHSPHDHVLPLGFVQSPILATLCLDKSPFGSLLRRLNKHHDLKLSVFMDDVIISSNNLAQLQAAYDEALVAMRKSGYQANMSKTQAPSSKISVFNLTLSKGVMKVTSQKMSDFLNDFYSSNYEPHRIGVKNYVEAVNPGQAKLFKLSGGSKRTADGSEFEPKKKRKV

SEQ ID NO: 1371 - protein, 1696 aa, synthetic construct
MKRTADGSEFESPKKKRKVDKKYSIGLDIGTNSVGWAVITDEYKVPSKKFKVLGNTDRHSIKKNLIGALLFDSGETAEATRLKRTARRRYTRRKNRICYLQEIFSNEMAKVDDSFFHRLEESFLVEEDKKHERHPIFGNIVDEVAYHEKYPTIYHLRKKLVDSTDKADLRLIYLALAHMIKFRGHFLIEGDLNPDNSDVDKLFIQLVQTYNQLFEENPINASGVDAKAILSARLSKSRRLENLIAQLPGEKKNGLFGNLIALSLGLTPNFKSNFDLAEDAKLQLSKDTYDDDLDNLLAQIGDQYADLFLAAKNLSDAILLSDILRVNTEITKAPLSASMIKRYDEHHQDLTLLKALVRQQLPEKYKEIFFDQSKNGYAGYIDGGASQEEFYKFIKPILEKMDGTEELLVKLNREDLLRKQRTFDNGSIPHQIHLGELHAILRRQEDFYPFLKDNREKIEKILTFRIPYYVGPLARGNSRFAWMTRKSEETITPWNFEEVVDKGASAQSFIERMTNFDKNLPNEKVLPKHSLLYEYFTVYNELTKVKYVTEGMRKPAFLSGEQKKAIVDLLFKTNRKVTVKQLKEDYFKKIECFDSVEISGVEDRFNASLGTYHDLLKIIKDKDFLDNEENEDILEDIVLTLTLFEDREMIEERLKTYAHLFDDKVMKQLKRRRYTGWGRLSRKLINGIRDKQSGKTILDFLKSDGFANRNFMQLIHDDSLTFKEDIQKAQVSGQGDSLHEHIANLAGSPAIKKGILQTVKVVDELVKVMGRHKPENIVIEMARENQTTQKGQKNSRERMKRIEEGIKELGSQILKEHPVENTQLQNEKLYLYYLQNGRDMYVDQELDINRLSDYDVDAIVPQSFLKDDSIDNKVLTRSDKNRGKSDNVPSEEVVKKMKNYWRQLLNAKLITQRKFDNLTKAERGGLSELDKAGFIKRQLVETRQITKHVAQILDSRMNTKYDENDKLIREVKVITLKSKLVSDFRKDFQFYKVREINNYHHAHDAYLNAVVGTALIKKYPKLESEFVYGDYKVYDVRKMIAKSEQEIGKATAKYFFYSNIMNFFKTEITLANGEIRKRPLIETNGETGEIVWDKGRDFATVRKVLSMPQVNIVKKTEVQTGGFSKESILPKRNSDKLIARKKDWDPKKYGGFDSPTVAYSVLVVAKVEKGKSKKLKSVKELLGITIMERSSFEKNPIDFLEAKGYKEVKKDLIIKLPKYSLFELENGRKRMLASAGELQKGNELALPSKYVNFLYLASHYEKLKGSPEDNEQKQLFVEQHKHYLDEIIEQISEFSKRVILADANLDKVLSAYNKHRDKPIREQAENIIHLFTLTNLGAPAAFKYFDTTIDRKRYTSTKEVLDATLIHQSITGLYETRIDLSQLGGDSGGSSGGSSGSETPGTSESATPESSGGSSGGSSTIEVQRWEDKFEIKPGVWVYVPSVEARKVGGKILQAVRNKWIPPLYFYHLRTGGHLKAARLHLKSDFFAVVDIKQFFQSTDRSRIERDLKSYFTYSQAREISTFSTVRNLSHSPHKHVLPLGFVQSPILATLCLDKSYFGSLLRRLNKHHDLKLSVFMDDVIISSNNLAQLQAAYDEALVAMRKSGYQANMSKTQAPSSKISVFNLTLSKGVMKVTSQKMSDFLIDFYSSNYEPHRIGVKNYVEAVNPGQAKLFKLSGGSKRTADGSEFEPKKKRKV

SEQ ID NO: 1372 - protein, 1696 aa, synthetic construct
MKRTADGSEFESPKKKRKVDKKYSIGLDIGTNSVGWAVITDEYKVPSKKFKVLGNTDRHSIKKNLIGALLFDSGETAEATRLKRTARRRYTRRKNRICYLQEIFSNEMAKVDDSFFHRLEESFLVEEDKKHERHPIFGNIVDEVAYHEKYPTIYHLRKKLVDSTDKADLRLIYLALAHMIKFRGHFLIEGDLNPDNSDVDKLFIQLVQTYNQLFEENPINASGVDAKAILSARLSKSRRLENLIAQLPGEKKNGLFGNLIALSLGLTPNFKSNFDLAEDAKLQLSKDTYDDDLDNLLAQIGDQYADLFLAAKNLSDAILLSDILRVNTEITKAPLSASMIKRYDEHHQDLTLLKALVRQQLPEKYKEIFFDQSKNGYAGYIDGGASQEEFYKFIKPILEKMDGTEELLVKLNREDLLRKQRTFDNGSIPHQIHLGELHAILRRQEDFYPFLKDNREKIEKILTFRIPYYVGPLARGNSRFAWMTRKSEETITPWNFEEVVDKGASAQSFIERMTNFDKNLPNEKVLPKHSLLYEYFTVYNELTKVKYVTEGMRKPAFLSGEQKKAIVDLLFKTNRKVTVKQLKEDYFKKIECFDSVEISGVEDRFNASLGTYHDLLKIIKDKDFLDNEENEDILEDIVLTLTLFEDREMIEERLKTYAHLFDDKVMKQLKRRRYTGWGRLSRKLINGIRDKQSGKTILDFLKSDGFANRNFMQLIHDDSLTFKEDIQKAQVSGQGDSLHEHIANLAGSPAIKKGILQTVKVVDELVKVMGRHKPENIVIEMARENQTTQKGQKNSRERMKRIEEGIKELGSQILKEHPVENTQLQNEKLYLYYLQNGRDMYVDQELDINRLSDYDVDAIVPQSFLKDDSIDNKVLTRSDKNRGKSDNVPSEEVVKKMKNYWRQLLNAKLITQRKFDNLTKAERGGLSELDKAGFIKRQLVETRQITKHVAQILDSRMNTKYDENDKLIREVKVITLKSKLVSDFRKDFQFYKVREINNYHHAHDAYLNAVVGTALIKKYPKLESEFVYGDYKVYDVRKMIAKSEQEIGKATAKYFFYSNIMNFFKTEITLANGEIRKRPLIETNGETGEIVWDKGRDFATVRKVLSMPQVNIVKKTEVQTGGFSKESILPKRNSDKLIARKKDWDPKKYGGFDSPTVAYSVLVVAKVEKGKSKKLKSVKELLGITIMERSSFEKNPIDFLEAKGYKEVKKDLIIKLPKYSLFELENGRKRMLASAGELQKGNELALPSKYVNFLYLASHYEKLKGSPEDNEQKQLFVEQHKHYLDEIIEQISEFSKRVILADANLDKVLSAYNKHRDKPIREQAENIIHLFTLTNLGAPAAFKYFDTTIDRKRYTSTKEVLDATLIHQSITGLYETRIDLSQLGGDSGGSSGGSSGSETPGTSESATPESSGGSSGGSSTIEVQRWEDKFEIKPGVWVYVPSVEARKVGGKILQAVRNKWIPPLYFYHLRTGGHLKAARLHLKSDFFAVVDIKQFFQSTNRARITRDLKSYFEYSQAEEISTFSTVRCLNHHPHDHVLPLGFVQSPILATLCLDKSPFGSLLRRLNKHHDLKLSVFMDDVIISSNNLAQLQAAYDEALVAMRKSGYQANMSKTQAPSSKISVFNLTLSKGVMKVTSQKMSDFLIDFYSSNYEPHRIGVKNYVEAVNPGQAKLFKLSGGSKRTADGSEFEPKKKRKV

SEQ ID NO: 1373 - protein, 1696 aa, synthetic construct
MKRTADGSEFESPKKKRKVDKKYSIGLDIGTNSVGWAVITDEYKVPSKKFKVLGNTDRHSIKKNLIGALLFDSGETAEATRLKRTARRRYTRRKNRICYLQEIFSNEMAKVDDSFFHRLEESFLVEEDKKHERHPIFGNIVDEVAYHEKYPTIYHLRKKLVDSTDKADLRLIYLALAHMIKFRGHFLIEGDLNPDNSDVDKLFIQLVQTYNQLFEENPINASGVDAKAILSARLSKSRRLENLIAQLPGEKKNGLFGNLIALSLGLTPNFKSNFDLAEDAKLQLSKDTYDDDLDNLLAQIGDQYADLFLAAKNLSDAILLSDILRVNTEITKAPLSASMIKRYDEHHQDLTLLKALVRQQLPEKYKEIFFDQSKNGYAGYIDGGASQEEFYKFIKPILEKMDGTEELLVKLNREDLLRKQRTFDNGSIPHQIHLGELHAILRRQEDFYPFLKDNREKIEKILTFRIPYYVGPLARGNSRFAWMTRKSEETITPWNFEEVVDKGASAQSFIERMTNFDKNLPNEKVLPKHSLLYEYFTVYNELTKVKYVTEGMRKPAFLSGEQKKAIVDLLFKTNRKVTVKQLKEDYFKKIECFDSVEISGVEDRFNASLGTYHDLLKIIKDKDFLDNEENEDILEDIVLTLTLFEDREMIEERLKTYAHLFDDKVMKQLKRRRYTGWGRLSRKLINGIRDKQSGKTILDFLKSDGFANRNFMQLIHDDSLTFKEDIQKAQVSGQGDSLHEHIANLAGSPAIKKGILQTVKVVDELVKVMGRHKPENIVIEMARENQTTQKGQKNSRERMKRIEEGIKELGSQILKEHPVENTQLQNEKLYLYYLQNGRDMYVDQELDINRLSDYDVDAIVPQSFLKDDSIDNKVLTRSDKNRGKSDNVPSEEVVKKMKNYWRQLLNAKLITQRKFDNLTKAERGGLSELDKAGFIKRQLVETRQITKHVAQILDSRMNTKYDENDKLIREVKVITLKSKLVSDFRKDFQFYKVREINNYHHAHDAYLNAVVGTALIKKYPKLESEFVYGDYKVYDVRKMIAKSEQEIGKATAKYFFYSNIMNFFKTEITLANGEIRKRPLIETNGETGEIVWDKGRDFATVRKVLSMPQVNIVKKTEVQTGGFSKESILPKRNSDKLIARKKDWDPKKYGGFDSPTVAYSVLVVAKVEKGKSKKLKSVKELLGITIMERSSFEKNPIDFLEAKGYKEVKKDLIIKLPKYSLFELENGRKRMLASAGELQKGNELALPSKYVNFLYLASHYEKLKGSPEDNEQKQLFVEQHKHYLDEIIEQISEFSKRVILADANLDKVLSAYNKHRDKPIREQAENIIHLFTLTNLGAPAAFKYFDTTIDRKRYTSTKEVLDATLIHQSITGLYETRIDLSQLGGDSGGSSGGSSGSETPGTSESATPESSGGSSGGSSTIEVQRWEDKFEIKPGVWVYVPSVEARKVGGKILQAVRNKWIPPLYFYHLRTGGHLKAARLHLKSDFFAVVDIKQFFQSTSRSRITRDLKSYFTYSQAREISTFSTVRNLSHSPHSHVLPFGFVQSPILATLCLDKSYFGSLLRRLNKHHDLKLSVFMDDVIISSNNLAQLQAAYDEALVAMRKSGYQANMSKTQAPSSKISVFNLTLSKGVMKVTSQKMSDFLIDFYSSNYEPHRIGVKNYVEAVNPGQAKLFKLSGGSKRTADGSEFEPKKKRKV

SEQ ID NO: 1374 - protein, 1696 aa, synthetic construct
MKRTADGSEFESPKKKRKVDKKYSIGLDIGTNSVGWAVITDEYKVPSKKFKVLGNTDRHSIKKNLIGALLFDSGETAEATRLKRTARRRYTRRKNRICYLQEIFSNEMAKVDDSFFHRLEESFLVEEDKKHERHPIFGNIVDEVAYHEKYPTIYHLRKKLVDSTDKADLRLIYLALAHMIKFRGHFLIEGDLNPDNSDVDKLFIQLVQTYNQLFEENPINASGVDAKAILSARLSKSRRLENLIAQLPGEKKNGLFGNLIALSLGLTPNFKSNFDLAEDAKLQLSKDTYDDDLDNLLAQIGDQYADLFLAAKNLSDAILLSDILRVNTEITKAPLSASMIKRYDEHHQDLTLLKALVRQQLPEKYKEIFFDQSKNGYAGYIDGGASQEEFYKFIKPILEKMDGTEELLVKLNREDLLRKQRTFDNGSIPHQIHLGELHAILRRQEDFYPFLKDNREKIEKILTFRIPYYVGPLARGNSRFAWMTRKSEETITPWNFEEVVDKGASAQSFIERMTNFDKNLPNEKVLPKHSLLYEYFTVYNELTKVKYVTEGMRKPAFLSGEQKKAIVDLLFKTNRKVTVKQLKEDYFKKIECFDSVEISGVEDRFNASLGTYHDLLKIIKDKDFLDNEENEDILEDIVLTLTLFEDREMIEERLKTYAHLFDDKVMKQLKRRRYTGWGRLSRKLINGIRDKQSGKTILDFLKSDGFANRNFMQLIHDDSLTFKEDIQKAQVSGQGDSLHEHIANLAGSPAIKKGILQTVKVVDELVKVMGRHKPENIVIEMARENQTTQKGQKNSRERMKRIEEGIKELGSQILKEHPVENTQLQNEKLYLYYLQNGRDMYVDQELDINRLSDYDVDAIVPQSFLKDDSIDNKVLTRSDKNRGKSDNVPSEEVVKKMKNYWRQLLNAKLITQRKFDNLTKAERGGLSELDKAGFIKRQLVETRQITKHVAQILDSRMNTKYDENDKLIREVKVITLKSKLVSDFRKDFQFYKVREINNYHHAHDAYLNAVVGTALIKKYPKLESEFVYGDYKVYDVRKMIAKSEQEIGKATAKYFFYSNIMNFFKTEITLANGEIRKRPLIETNGETGEIVWDKGRDFATVRKVLSMPQVNIVKKTEVQTGGFSKESILPKRNSDKLIARKKDWDPKKYGGFDSPTVAYSVLVVAKVEKGKSKKLKSVKELLGITIMERSSFEKNPIDFLEAKGYKEVKKDLIIKLPKYSLFELENGRKRMLASAGELQKGNELALPSKYVNFLYLASHYEKLKGSPEDNEQKQLFVEQHKHYLDEIIEQISEFSKRVILADANLDKVLSAYNKHRDKPIREQAENIIHLFTLTNLGAPAAFKYFDTTIDRKRYTSTKEVLDATLIHQSITGLYETRIDLSQLGGDSGGSSGGSSGSETPGTSESATPESSGGSSGGSSTIEVQRWEDKFEIKPGVWVYVPSVEARKVGGKILQAVRNKWIPPLYFYHLRTGGHLKAARLHLKSDFFAVVDIKQFFQSTSRERITRDLKSYFTESQAREISTFSTVRCLSHSPHKHVLPLGFVQSPILATLCLDKSYFGSLLRRLNKHHDLKLSVFMDDVIISSNNLAQLQAAYDEALVAMRKSGYQANMSKTQAPSSKISVFNLTLSKGVMKVTSQKMSDFLIDFYSSNYEPHRIGVKNYVEAVNPGQAKLFKLSGGSKRTADGSEFEPKKKRKV

SEQ ID NO: 1375 - protein, 242 aa, synthetic construct
RWEHRFELQPGRWVFVPTEEAREQGKEIKKQVEKRWKPPAYYYHLRQGGHVAALRCHLDNPWFAHVDLEDFFGQINRSRVTRALKGFFSYEEAWEMACESTVRRPPDSEFMLPYGFVQSPILASLALDKSALGRYLRQLNKNDGLTVSVYMDDIVISGDDEEMLEQAFDELKQAAEKSGFPLNEEKTQGPASQITAFNIELSHNSMEITEERMAEFQEAYRQGNEHQKEGILGYVGSVNPAQ

SEQ ID NO: 1376 - protein, 242 aa, synthetic construct
RWEHRFELKPGRWVFVPTEEAREQGKEIKKQVEKRWKPPAYYYHLRQGGHVAALRCHLDNPWFAHVDLEDFFGQINRSRVTEALKGFFSYEEAWEMACESTVRRPPDSEFMLPYGFVQSPILASLALDKSALGRYLRQLNKNDGLTVSVYMDDIVISGDDEEMLEQAFDELKQAAEKSGFPLNEEKTQGPASQITAFNIELSHNSMEITEERMAEFQEAYRQGNEHQKEGILGYVGSVNPAQ

SEQ ID NO: 1377 - protein, 242 aa, synthetic construct
RWEHRFELKPGRWVFVPTEEAREQGKEIKKQVEKRWKPPAYYYHLRQGGHVAALRCHLDNPWFAHVDLEDFFGQINRSRVTRALKGFFGYEEAWEMACESTVRRPPDSEFMLPYGFVQSPILASLALDKSALGRYLRQLNKNDGLTVSVYMDDIVISGDDEEMLEQAFDELKQAAEKSGFPLNEEKTQGPASQITAFNIELSHNSMEITEERMAEFQEAYRQGNEHQKEGILGYVGSVNPAQ

SEQ ID NO: 1378 - protein, 242 aa, synthetic construct
RWEHRFELKPGRWVFVPTEEAREQGKEIKKQVEKRWKPPAYYYHLRQGGHVAALRCHLDNPWFAHVDLEDFFGQINRSRVTRALKGFFSREEAWEMACESTVRRPPDSEFMLPYGFVQSPILASLALDKSALGRYLRQLNKNDGLTVSVYMDDIVISGDDEEMLEQAFDELKQAAEKSGFPLNEEKTQGPASQITAFNIELSHNSMEITEERMAEFQEAYRQGNEHQKEGILGYVGSVNPAQ

SEQ ID NO: 1379 - protein, 242 aa, synthetic construct
RWEHRFELKPGRWVFVPTEEAREQGKEIKKQVEKRWKPPAYYYHLRQGGHVAALRCHLDNPWFAHVDLEDFFGQINRSRVTRALKGFFSDEEAWEMACESTVRRPPDSEFMLPYGFVQSPILASLALDKSALGRYLRQLNKNDGLTVSVYMDDIVISGDDEEMLEQAFDELKQAAEKSGFPLNEEKTQGPASQITAFNIELSHNSMEITEERMAEFQEAYRQGNEHQKEGILGYVGSVNPAQ

SEQ ID NO: 1380 - protein, 242 aa, synthetic construct
RWEHRFELKPGRWVFVPTEEAREQGKEIKKQVEKRWKPPAYYYHLRQGGHVAALRCHLDNPWFAHVDLEDFFGQINRSRVTRALKGFFSKEEAWEMACESTVRRPPDSEFMLPYGFVQSPILASLALDKSALGRYLRQLNKNDGLTVSVYMDDIVISGDDEEMLEQAFDELKQAAEKSGFPLNEEKTQGPASQITAFNIELSHNSMEITEERMAEFQEAYRQGNEHQKEGILGYVGSVNPAQ

SEQ ID NO: 1381 - protein, 242 aa, synthetic construct
RWEHRFELKPGRWVFVPTEEAREQGKEIKKQVEKRWKPPAYYYHLRQGGHVAALRCHLDNPWFAHVDLEDFFGQINRSRVTRALKGFFSNEEAWEMACESTVRRPPDSEFMLPYGFVQSPILASLALDKSALGRYLRQLNKNDGLTVSVYMDDIVISGDDEEMLEQAFDELKQAAEKSGFPLNEEKTQGPASQITAFNIELSHNSMEITEERMAEFQEAYRQGNEHQKEGILGYVGSVNPAQ

SEQ ID NO: 1382 - protein, 242 aa, synthetic construct
RWEHRFELKPGRWVFVPTEEAREQGKEIKKQVEKRWKPPAYYYHLRQGGHVAALRCHLDNPWFAHVDLEDFFGQINRSRVTRALKGFFSSEEAWEMACESTVRRPPDSEFMLPYGFVQSPILASLALDKSALGRYLRQLNKNDGLTVSVYMDDIVISGDDEEMLEQAFDELKQAAEKSGFPLNEEKTQGPASQITAFNIELSHNSMEITEERMAEFQEAYRQGNEHQKEGILGYVGSVNPAQ

SEQ ID NO: 1383 - protein, 242 aa, synthetic construct
RWEHRFELKPGRWVFVPTEEAREQGKEIKKQVEKRWKPPAYYYHLRQGGHVAALRCHLDNPWFAHVDLEDFFGQINRSRVTRALKGFFSYEEAEEMACESTVRRPPDSEFMLPYGFVQSPILASLALDKSALGRYLRQLNKNDGLTVSVYMDDIVISGDDEEMLEQAFDELKQAAEKSGFPLNEEKTQGPASQITAFNIELSHNSMEITEERMAEFQEAYRQGNEHQKEGILGYVGSVNPAQ

SEQ ID NO: 1384 - protein, 242 aa, synthetic construct
RWEHRFELKPGRWVFVPTEEAREQGKEIKKQVEKRWKPPAYYYHLRQGGHVAALRCHLDNPWFAHVDLEDFFGQINRSRVTRALKGFFSYEEAWEMACESTVNRPPDSEFMLPYGFVQSPILASLALDKSALGRYLRQLNKNDGLTVSVYMDDIVISGDDEEMLEQAFDELKQAAEKSGFPLNEEKTQGPASQITAFNIELSHNSMEITEERMAEFQEAYRQGNEHQKEGILGYVGSVNPAQ

SEQ ID NO: 1385 - protein, 242 aa, synthetic construct
RWEHRFELKPGRWVFVPTEEAREQGKEIKKQVEKRWKPPAYYYHLRQGGHVAALRCHLDNPWFAHVDLEDFFGQINRSRVTRALKGFFSYEEAWEMACESTVRMPPDSEFMLPYGFVQSPILASLALDKSALGRYLRQLNKNDGLTVSVYMDDIVISGDDEEMLEQAFDELKQAAEKSGFPLNEEKTQGPASQITAFNIELSHNSMEITEERMAEFQEAYRQGNEHQKEGILGYVGSVNPAQ

SEQ ID NO: 1386 - protein, 242 aa, synthetic construct
RWEHRFELTPGRWVFVPTEEAREQGKEIKKQVEKRWKPPAYYYHLRQGGHVAALRCHLDNPWFAHVDLEDFFGQINRSRVTRALKGFFSYEEAWEMACESTVRRPPDSEFMLPYGFVQSPILASLALDKSALGRYLRQLNKNDGLTVSVYMDDIVISGDDEEMLEQAFDELKQAAEKSGFPLNEEKTQGPASQITAFNIELSHNSMEITEERMAEFQEAYRQGNEHQKEGILGYVGSVNPAQ

SEQ ID NO: 1387 - protein, 242 aa, synthetic construct
RWEHRFELKPGRWVFVPTEEAREQGKEIKKQVEKRWKPPAYYYHLRQGGHVAALRCHLDNPWFAHVDLEDFFGQINRSRVTRALKGFFSYEEAWEMACESTVRRPPDSEFMLPYGWVQSPILASLALDKSALGRYLRQLNKNDGLTVSVYMDDIVISGDDEEMLEQAFDELKQAAEKSGFPLNEEKTQGPASQITAFNIELSHNSMEITEERMAEFQEAYRQGNEHQKEGILGYVGSVNPAQ

SEQ ID NO: 1388 - protein, 242 aa, synthetic construct
RWEHRFELKPGRWVFVPTEEAREQGKEIKKQVEKRWKPPAYYYHLRQGGHVAALRCHLDNPWFAHVDLEDFFGQINRSRVTRALKGFFSYEEAWEMACESTVRRPPDSEFMLPYGFPQSPILASLALDKSALGRYLRQLNKNDGLTVSVYMDDIVISGDDEEMLEQAFDELKQAAEKSGFPLNEEKTQGPASQITAFNIELSHNSMEITEERMAEFQEAYRQGNEHQKEGILGYVGSVNPAQ

SEQ ID NO: 1389 - protein, 242 aa, synthetic construct
RWEHRFELKPGRWVFVPTEEAREQGKEIKKQVEKRWKPPAYYYHLRQGGHVAALRCHLDNPWFAHVDLEDFFGQINRSRVTRALKGFFSYEEAWEMACESTVRRPPDSEFMLPYGFVQSPILAALALDKSALGRYLRQLNKNDGLTVSVYMDDIVISGDDEEMLEQAFDELKQAAEKSGFPLNEEKTQGPASQITAFNIELSHNSMEITEERMAEFQEAYRQGNEHQKEGILGYVGSVNPAQ

SEQ ID NO: 1390 - protein, 242 aa, synthetic construct
RWEHRFELKPGRWVFVPTEEAREQGKEIKKQVEKRWKPPAYYYHLRQGGHVAALRCHLDNPWFAHVDLEDFFGQINRSRVTRALKGFFSYEEAWEMACESTVRRPPDSEFMLPYGFVQSPILASLALDKSPLGRYLRQLNKNDGLTVSVYMDDIVISGDDEEMLEQAFDELKQAAEKSGFPLNEEKTQGPASQITAFNIELSHNSMEITEERMAEFQEAYRQGNEHQKEGILGYVGSVNPAQ

SEQ ID NO: 1391 - protein, 242 aa, synthetic construct
RWEHRFELKPGRWVFVPTEEAREQGKEIKKQVEKRWKPPAYYYHLRQGGHVAALRCHLDNPWFAHVDLEDFFGQINRSRVTRALKGFFSYEEAWEMACESTVRRPPDSEFMLPYGFVQSPILASLALDKSALGRSLRQLNKNDGLTVSVYMDDIVISGDDEEMLEQAFDELKQAAEKSGFPLNEEKTQGPASQITAFNIELSHNSMEITEERMAEFQEAYRQGNEHQKEGILGYVGSVNPAQ

SEQ ID NO: 1392 - protein, 242 aa, synthetic construct
RWEHRFELKPGRWVFVPTEEAREQGKEIKKQVEKRWKPPAYYYHLRQGGHVAALRCHLDNPWFAHVDLEDFFGQINRSRVTRALKGFFSYEEAWEMACESTVRRPPDSEFMLPYGFVQSPILASLALDKSALGRKLRQLNKNDGLTVSVYMDDIVISGDDEEMLEQAFDELKQAAEKSGFPLNEEKTQGPASQITAFNIELSHNSMEITEERMAEFQEAYRQGNEHQKEGILGYVGSVNPAQ

SEQ ID NO: 1393 - protein, 242 aa, synthetic construct
RWEHRFELKPGRWVFVPTEEAREQGKEIKKQVEKRWKPPAYYYHLRQGGHVAALRCHLDNPWFAHVDLEDFFGQINRSRVTRALKGFFSYEEAWEMACESTVRRPPDSEFMLPYGFVQSPILASLALDKSALGRYLRQLNKNDGLTVSMYMDDIVISGDDEEMLEQAFDELKQAAEKSGFPLNEEKTQGPASQITAFNIELSHNSMEITEERMAEFQEAYRQGNEHQKEGILGYVGSVNPAQ

SEQ ID NO: 1394 - protein, 242 aa, synthetic construct
RWEHRFELKPGRWVFVPTEEAREQGKEIKKQVEKRWKPPAYYYHLRQGGHVAALRCHLDNPWFAHVDLEDFFGQINRSRVTRALKGFFSYEEAWEMACESTVRRPPDSEFMLPYGFVQSPILASLALDKSALGRYLRQLNKNDGLTVSVYMDDIVISGDDEEMLEQAFDELKQAAEKSGFTLNEEKTQGPASQITAFNIELSHNSMEITEERMAEFQEAYRQGNEHQKEGILGYVGSVNPAQ

SEQ ID NO: 1395 - protein, 242 aa, synthetic construct
RWEHRFELKPGRWVFVPTEEAREQGKEIKKQVEKRWKPPAYYYHLRQGGHVAALRCHLDNPWFAHVDLEDFFGQINRSRVTRALKGFFSYEEAWEMACESTVRRPPDSEFMLPYGFVQSPILASLALDKSALGRYLRQLNKNDGLTVSVYMDDIVISGDDEEMLEQAFDELKQAAEKSGFYLNEEKTQGPASQITAFNIELSHNSMEITEERMAEFQEAYRQGNEHQKEGILGYVGSVNPAQ

SEQ ID NO: 1396 - protein, 242 aa, synthetic construct
RWEHRFELKPGRWVFVPTEEAREQGKEIKKQVEKRWKPPAYYYHLRQGGHVAALRCHLDNPWFAHVDLEDFFGQINRSRVTRALKGFFSYEEAWEMACESTVRRPPDSEFMLPYGFVQSPILASLALDKSALGRYLRQLNKNDGLTVSVYMDDIVISGDDEEMLEQAFDELKQAAEKSGFPLNEEHTQGPASQITAFNIELSHNSMEITEERMAEFQEAYRQGNEHQKEGILGYVGSVNPAQ

SEQ ID NO: 1397 - protein, 242 aa, synthetic construct
RWEHRFELKPGCWVFVPTEEAREQGKEIKKQVEKRWKPPAYYYHLRQGGHVAALRCHLDNPWFAHVDLEDFFGQINRSRVTRALKGFFSYEEAWEMACESTVRRPPDSEFMLPYGFVQSPILASLALDKSALGRYLRQLNKNDGLTVSVYMDDIVISGDDEEMLEQAFDELKQAAEKSGFPLNEEKTQGPASQITAFNIELSHNSMEITEERMAEFQEAYRQGNEHQKEGILGYVGSVNPAQ

SEQ ID NO: 1398 - protein, 242 aa, synthetic construct
RWEHRFELKPGRWVFVPTEEAREQGKEIKKQVEKRWKPPAYYYHLRQGGHVAALRCHLDNPWFAHVDLEDFFGQINRSRVTRALKGFFSYEEAWEMACESTVRRPPDSEFMLPYGFVQSPILASLALDKSALGRYLRQLNKNDGLTVSVYMDDIVISGDDEEMLEQAFDELKQAAEKSGFPLNEEKTQGPASQLTAFNIELSHNSMEITEERMAEFQEAYRQGNEHQKEGILGYVGSVNPAQ

SEQ ID NO: 1399 - protein, 242 aa, synthetic construct
RWEHRFELKPGRWVFVPTEEAREQGKEIKKQVEKRWKPPAYYYHLRQGGHVAALRCHLDNPWFAHVDLEDFFGQINRSRVTRALKGFFSYEEAWEMACESTVRRPPDSEFMLPYGFVQSPILASLALDKSALGRYLRQLNKNDGLTVSVYMDDIVISGDDEEMLEQAFDELKQAAEKSGFPLNEEKTIGPASQITVFSIELSHNSMEITEERMAEFQEAYRQGNEHQKEGILGYVGSVNPAQ

SEQ ID NO: 1400 - protein, 242 aa, synthetic construct
RWEHRFELKPGRWVFVPTEEAREQGKEIKKQVEKRWKPPAYYYHLRQGGHVAALRCHLDNPWFAHVDLEDFFGQINRSRVTRALKGFFSYEEAWEMACESTVRRPPDSEFMLPYGFVQSPILASLALDKSALGRYLRQLNKNDGLTVSVYMDDIVISGDDEEMLEQAFDELKQAAEKSGFPLNEEKTQGPASQISLFNIELSHNSMEITEERMAEFQEAYRQGNEHQKEGILGYVGSVNPAQ

SEQ ID NO: 1401 - protein, 242 aa, synthetic construct
RWEHRFELKPGRWVFVPTEEAREQGKEIKKQVEKRWKPPAYFYHLRQGGHVAALRCHLDNPWFAHVDLEDFFGQINRSRVTRALKGFFSYEEAWEMACESTVRRPPDSEFMLPYGFVQSPILAALAFDKSALGRYLRQLNKNDGLTVSVYMDDIVISGDDEEMLEQAFDELKQAAEKSGFPLNEEKTQGPASQITAFNIELSHNSMEITEERMAEFQEAYRQGNEHQKEGILGYVGSVNPAQ

SEQ ID NO: 1402 - protein, 242 aa, synthetic construct
RWEHRFELKPGRWVFVPTEEAREQGKEIKKQVEKRWKPPAYCYHLRQGGHVAALRCHLDNPWFAHVDLEDFFGQINRSRVTRALKGFFSYEEAWEMACESTVRRPPDSEFMLPYGFVQSPILASLAFDKSALGRYLRQLNKNDGLTVSVYMDDIVISGDDEEMLEQAFDELKQAAEKSGFPLNEEKTQGPASQITAFNIELSHNSMEITEERMAEFQEAYRQGNEHQKEGILGYVGSVNPAQ

SEQ ID NO: 1403 - protein, 242 aa, synthetic construct
RWEHRFELKPGRWVFVPTEEAREQGKEIKKQVEKRWKPPAYCYHLRQGGHVAALRCHLDNPWFAHVDLEDFFGQINRSRVTRALKGFFSYEEAWEMACESTVRRPPDSEFMLPYGFVQSPILATLAMDKSALGRYLRQLNKNDGLTVSVYMDDIVISGDDEEMLEQAFDELKQAAEKSGFPLNEEKTQGPASQITAFNIELSHNSMEITEERMAEFQEAYRQGNEHQKEGILGYVGSVNPAQ

SEQ ID NO: 1404 - protein, 242 aa, synthetic construct
RWEHRFELKPGRWVFVPTEEAREQGKEIKKQVEKRWKPPAYFYHLRQGGHVAALRCHLDNPWFAHVDLEDFFGQINRSRVTRALKGFFSYEEAWEMACESTVRRPPDSEFMLPYGFVQSPILASLAFDKSALGRYLRQLNKNDGLTVSVYMDDIVISGDDEEMLEQAFDELKQAAEKSGFPLNEEKTQGPASQITAFNIELSHNSMEITEERMAEFQEAYRQGNEHQKEGILGYVGSVNPAQ

SEQ ID NO: 1405 - protein, 242 aa, synthetic construct
RWEHRFELKPGRWVFVPTEEAREQGKEIKKQVEKRWKPPAYYYHLRQGGHVAALRCHLDNPWFAHVDLEDFFGQINRSRVTRALKGFFSYEEAWEMACESTVRRPPDSEFMLPYGFVQSPILATLAMDKSALGRYLRQLNKNDGLTVSVYMDDIVISGDDEEMLEQAFDELKQAAEKSGFPLNEEKTQGPASQITAFNIELSHNSMEITEERMAEFQEAYRQGNEHQKEGILGYVGSVNPAQ

SEQ ID NO: 1406 - protein, 242 aa, synthetic construct
RWEHRFELKPGRWVFVPTEEAREQGKEIKKQVEKRWKPPAYYYRLRQGGHVAALRCHLDNPWFAHVDLEDFFGQINRSRVTRALKGFFSYEEAWEMACESTVRRPPDSEFMLPYGFVQSPILASLAFDKSALGRYLRQLNKNDGLTVSVYMDDIVISGDDEEMLEQAFDELKQAAEKSGFPLNEEKTQGPASQITAFNIELSHNSMEITEERMAEFQEAYRQGNEHQKEGILGYVGSVNPAQ

SEQ ID NO: 1407 - protein, 242 aa, synthetic construct
RWEHRFELKPGRWVFVPTEEAREQGKEIKKQVEKRWKPPAYFYHLRQGGHVAALRCHLDNPWFAHVDLEDFFGQINRSRVTRALKGFFSYEEAWEMACESTVRRPPDSEFMLPYGFVQSPILATLAMDKSALGRYLRQLNKNDGLTVSVYMDDIVISGDDEEMLEQAFDELKQAAEKSGFPLNEEKTQGPASQITAFNIELSHNSMEITEERMAEFQEAYRQGNEHQKEGILGYVGSVNPAQ

SEQ ID NO: 1408 - protein, 242 aa, synthetic construct
RWEHRFELKPGNWVFVPTEEAREQGKEIKKQVEKRWKPPAYYYHLRQGGHVAALRCHLDNPWFAHVDLEDFFGQINRSRVTRALKGFFSYEEAWEMACESTVRRPPDSEFMLPYGFVQSPILASLALDKSALGRYLRQLNKNDGLTVSVYMDDIVISGDDEEMLEQAFDELKQAAEKSGFPLNEEKTQGPASQITAFNIELSHNSMEITEERMAEFQEAYRQGNEHQKEGILGYVGSVNPAQ

SEQ ID NO: 1409 - protein, 242 aa, synthetic construct
RWEHRFELKPGRWVFVPTEEAREQGKEIKKQVEKRWKPPAYYYHLRQGGHVAALRCHLDNPWFAHVDLEDFFGQINRSRVTRALKGFFSYEEAWEMACESTVRRPPDSEFMLPYGFVQSPILATLARDKSALGRYLRQLNKNDGLTVSVYMDDIVISGDDEEMLEQAFDELKQAAEKSGFPLNEEKTQGPASQITAFNIELSHNSMEITEERMAEFQEAYRQGNEHQKEGILGYVGSVNPAQ

SEQ ID NO: 1410 - protein, 242 aa, synthetic construct
RWEHRFELKPGRWVFVPTEEAREQGKEIKKQVEKRWKPPAYYYRLRQGGHVAALRCHLDNPWFAHVDLEDFFGQINRSRVTRALKGFFSYEEAWEMACESTVRRPPDSEFMLPYGFVQSPILATLAMDKSALGRYLRQLNKNDGLTVSVYMDDIVISGDDEEMLEQAFDELKQAAEKSGFPLNEEKTQGPASQITAFNIELSHNSMEITEERMAEFQEAYRQGNEHQKEGILGYVGSVNPAQ

SEQ ID NO: 1411 - protein, 242 aa, synthetic construct
RWEHRFELKPGRWVFVPTEEAREQGKEIKKQVEKRWKPPAYCYRLRQGGHVAALRCHLDNPWFAHVDLEDFFGQINRSRVTRALKGFFSYEEAWEMACESTVRRPPDSEFMLPYGFVQSPILASLAFDKSALGRYLRQLNKNDGLTVSVYMDDIVISGDDEEMLEQAFDELKQAAEKSGFPLNEEKTQGPASQITAFNIELSHNSMEITEERMAEFQEAYRQGNEHQKEGILGYVGSVNPAQ

SEQ ID NO: 1412 - protein, 242 aa, synthetic construct
RWEHRFELKPGRWVFVPTEEAREQGKEIKKQVEKRWKPPAYFYHLRQGGHVAALRCHLDNPWFAHVDLEDFFGQINRSRVTRALKGFFSYEEAWEMACESTVRRPPDSEFMLPYGFVQSPILAILALDKSALGRYLRQLNKNDGLTVSVYMDDIVISGDDEEMLEQAFDELKQAAEKSGFPLNEEKTQGPASQITAFNIELSHNSMEITEERMAEFQEAYRQGNEHQKEGILGYVGSVNPAQ

SEQ ID NO: 1413 - protein, 242 aa, synthetic construct
RWEHRFELKPGRWVFVPTEEAREQGKEIKKQVEKRWKPPAYYYHLRQGGHVAALRCHLDNPWFAHVDLEDFFGQINRSRVTRALKGFFSYEEAWEMACESTVRRPPDSEFMLPYGFVQSPILATLAFDKSALGRYLRQLNKNDGLTVSVYMDDIVISGDDEEMLEQAFDELKQAAEKSGFPLNEEKTQGPASQITAFNIELSHNSMEITEERMAEFQEAYRQGNEHQKEGILGYVGSVNPAQ

SEQ ID NO: 1414 - protein, 242 aa, synthetic construct
RWEHRFELKPGRWVFVPTEEAREQGKEIKKQVEKRWKPPAYFYHLRQGGHVAALRCHLDNPWFAHVDLEDFFGQINRSRVTRALKGFFSYEEAWEMACESTVRRPPDSEFMLPYGFVQSPILAALAFDKSALGRYLRQLNKNDGLTVSVYMDDIVISGDDEEMLEQAFDELKQAAEKSGFPLNEEKTDGPASQISAFNIELSHNVMEITEERMAEFQEAYRQGNEHQKEGILGYVGSVNPAQ

SEQ ID NO: 1415 - protein, 242 aa, synthetic construct
RWEHRFELKPGRWVFVPTEEAREQGKEIKKQVEKRWKPPAYCYHLRQGGHVAALRCHLDNPWFAHVDLEDFFGQINRSRVTRALKGFFSYEEAWEMACESTVRRPPDSEFMLPYGFVQSPILATLAMDKSALGRYLRQLNKNDGLTVSVYMDDIVISGDDEEMLEQAFDELKQAAEKSGFPLNEEKTDGPASQISAFNIELSHNVMEITEERMAEFQEAYRQGNEHQKEGILGYVGSVNPAQ

SEQ ID NO: 1416 - protein, 242 aa, synthetic construct
RWEHRFELKPGRWVFVPTEEAREQGKEIKKQVEKRWKPPAYYYHLRQGGHVAALRCHLDNPWFAHVDLEDFFGQINRSRVTRALKGFFSYEEAWEMACESTVRRPPDSEFMLPYGFVQSPILATLAMDKSALGRYLRQLNKNDGLTVSVYMDDIVISGDDEEMLEQAFDELKQAAEKSGFPLNEEKTDGPASQISAFNIELSHNVMEITEERMAEFQEAYRQGNEHQKEGILGYVGSVNPAQ

SEQ ID NO: 1417 - protein, 242 aa, synthetic construct
RWEHRFELKPGRWVFVPTEEAREQGKEIKKQVEKRWKPPAYYYHLRQGGHVAALRCHLDNPWFAHVDLEDFFGQINRSRVTRALKGFFSYEEAWEMACESTVRRPPDSEFMLPYGFVQSPILASLAMDKSALGRYLRQLNKNDGLTVSVYMDDIVISGDDEEMLEQAFDELKQAAEKSGFPLNEEKTDGPASQISAFNIELSHNVMEITEERMAEFQEAYRQGNEHQKEGILGYVGSVNPAQ

SEQ ID NO: 1418 - protein, 242 aa, synthetic construct
RWEHRFELKPGRWVFVPTEEAREQGKEIKKQVEKRWKPPAYYYHLRQGGHVAALRCHLDNPWFAHVDLEDFFGQINRSRVTRALKGFFSYEEAWEMACESTVRRPPDSEFMLPYGFVQSPILASLAFDKSALGRYLRQLNKNDGLTVSVYMDDIVISGDDEEMLEQAFDELKQAAEKSGFPLNEEKTDGPASQISAFNIELSHNVMEITEERMAEFQEAYRQGNEHQKEGILGYVGSVNPAQ

SEQ ID NO: 1419 - protein, 242 aa, synthetic construct
RWEHRFELKPGRWVFVPTEEAMEQGKEIKKQVEKRWKPPAYYYHLRQGGHVAALRCHLDNPWFAHVDLEDFFGQINRSRVTRALKGFFSYEEAWEMACESTVRRPPDSEFMLPYGFVQSPILASLALDKSALGRYLRQLNKNDGLTVSVYMDDIVISGDDEEMLEQAFDELKQAAEKSGFPLNEEKTQGPASQITAFNIELSHNSMEITEERMAEFQEAYRQGNEHQKEGILGYVGSVNPAQ

SEQ ID NO: 1420 - protein, 242 aa, synthetic construct
RWEHRFELKPGRWVFVPTEEAREQGKEIKKQVEKRWKPPAYYYRLRQGGHVAALRCHLDNPWFAHVDLEDFFGQINRSRVTRALKGFFSYEEAWEMACESTVRRPPDSEFMLPYGFVQSPILASLAFDKSALGRYLRQLNKNDGLTVSVYMDDIVISGDDEEMLEQAFDELKQAAEKSGFPLNEEKTDGPASQISAFNIELSHNVMEITEERMAEFQEAYRQGNEHQKEGILGYVGSVNPAQ

SEQ ID NO: 1421 - protein, 242 aa, synthetic construct
RWEHRFELKPGRWVFVPTEEAREQGKEIKKQVEKRWKPPAYCYRLRQGGHVAALRCHLDNPWFAHVDLEDFFGQINRSRVTRALKGFFSYEEAWEMACESTVRRPPDSEFMLPYGFVQSPILATLAMDKSALGRYLRQLNKNDGLTVSVYMDDIVISGDDEEMLEQAFDELKQAAEKSGFPLNEEKTDGPASQISAFNIELSHNVMEITEERMAEFQEAYRQGNEHQKEGILGYVGSVNPAQ

SEQ ID NO: 1422 - protein, 242 aa, synthetic construct
RWEHRFELKPGRWVFVPTEEAREQGKEIKKQVEKRWKPPAYYYRLRQGGHVAALRCHLDNPWFAHVDLEDFFGQINRSRVTRALKGFFSYEEAWEMACESTVRRPPDSEFMLPYGFVQSPILATLAMDKSALGRYLRQLNKNDGLTVSVYMDDIVISGDDEEMLEQAFDELKQAAEKSGFPLNEEKTDGPASQISAFNIELSHNVMEITEERMAEFQEAYRQGNEHQKEGILGYVGSVNPAQ

SEQ ID NO: 1423 - protein, 242 aa, synthetic construct
RWEHRFELKPGRWVFVPTEEAREQGKEAKKQVEKRWKPPAYYYHLRQGGHVAALRCHLDNPWFAHVDLEDFFGQINRSRVTRALKGFFSYEEAWEMACESTVRRPPDSEFMLPYGFVQSPILASLALDKSALGRYLRQLNKNDGLTVSVYMDDIVISGDDEEMLEQAFDELKQAAEKSGFPLNEEKTQGPASQITAFNIELSHNSMEITEERMAEFQEAYRQGNEHQKEGILGYVGSVNPAQ

SEQ ID NO: 1424 - protein, 242 aa, synthetic construct
RWEHRFELKPGRWVFVPTEEAREQGKEIKKQVEKRWKPPAYYYHLRQGGHVAALRCHLDNPWFAIVDLEDFFGQINRSRVTRALKGFFSYEEAWEMACESTVRRPPDSEFMLPYGFVQSPILASLALDKSALGRYLRQLNKNDGLTVSVYMDDIVISGDDEEMLEQAFDELKQAAEKSGFPLNEEKTQGPASQITAFNIELSHNSMEITEERMAEFQEAYRQGNEHQKEGILGYVGSVNPAQ

SEQ ID NO: 1425 - protein, 242 aa, synthetic construct
RWEHRFELKPGRWVFVPTEEAREQGKEIKKQVEKRWKPPAYYYHLRQGGHVAALRCHLDNPWFAKVDLEDFFGQINRSRVTRALKGFFSYEEAWEMACESTVRRPPDSEFMLPYGFVQSPILASLALDKSALGRYLRQLNKNDGLTVSVYMDDIVISGDDEEMLEQAFDELKQAAEKSGFPLNEEKTQGPASQITAFNIELSHNSMEITEERMAEFQEAYRQGNEHQKEGILGYVGSVNPAQ

SEQ ID NO: 1426 - protein, 242 aa, synthetic construct
RWEHRFELKPGRWVFVPTEEAREQGKEIKKQVEKRWKPPAYYYHLRQGGHVAALRCHLDNPWFAHVDLEDFFGQINRDRVTRALKGFFSYEEAWEMACESTVRRPPDSEFMLPYGFVQSPILASLALDKSALGRYLRQLNKNDGLTVSVYMDDIVISGDDEEMLEQAFDELKQAAEKSGFPLNEEKTQGPASQITAFNIELSHNSMEITEERMAEFQEAYRQGNEHQKEGILGYVGSVNPAQ

SEQ ID NO: 1427 - protein, 242 aa, synthetic construct
RWEHRFELKPGRWVFVPTEEAREQGKEIKKQVEKRWKPPAYYYHLQQGGHVAALRCHLDNPWFAHVDLEDFFGQINRSRVTRALKGFFSCEEAWEMSCESTVRRPPDSEFMLPYGFVQSPILASLALDKSALGRYLRQLNKNDGLTVSVYMDDIVISGDDEEMLEQAFDELKQAAEKSGFPLNEEITQGPASQITAFNIELSHNSMEITEERMAEFQEAYRQGNEHQKEGILGYVGSVNPAQ

SEQ ID NO: 1428 - protein, 242 aa, synthetic construct
RWEHRFELKPGRWVFVPTEEAREQGKEIKKQVEKRWKPPAYYYHLRQGGHVAALRCHLDNPWFAHVDLEDFFGQINRSRVTRALKGFFSYEEAIEMACESTVRRPPDSEFMLPYGFVQSPILASLALDKSALGRYLRQLNKNDGLTVSVYMDDIVISGDDEEMLEQAFDELKQAAEKSGFPLNEEKTQGPASQITAFNIELSHNSMEITEERAAEFQEAYCQGNEHQKEGILGYVGNVNPAQ

SEQ ID NO: 1429 - protein, 242 aa, synthetic construct
RWEHRFELKPGRWVFVPTEEAREQGKEIKKQVEKRWKPPAYYYHLRQGGHVAALRCHLDNPWFAKVDLEDFFGQINRSRVTRALKGFFSSEEAWEMACESTVRRPPDSEFMLPYGFVQSPILASLALDKSALGRYLRQLNKNDGLTVSVYMDDIVISGDDEEMLEQAFDELKQAAEKSGFPLNEEKTQGPASQITAFNIELSHNSMEITEERMAEFQEAYRQGNEHQKEGILGYVGSVNPAQ

SEQ ID NO: 1430 - protein, 242 aa, synthetic construct
RWEHRFELKPGRWVFVPTEEAREQGKEIKKQVEKRWKPPAYYYHLRQGGHVAALRCHLDNPWFAHVDLEDFFGQINRSRVTRALKGFFSREEAWEMACESTVRRPPDSEFMLPYGFVQSPILASLALDKSPLGRYLRQLNKNDGLTVSVYMDDIVISGDDEEMLEQAFDELKQAAEKSGFPLNEEKTQGPASQITAFNIELSHNSMEITEERMAEFQEAYRQGNEHQKEGILGYVGSVNPAQ

SEQ ID NO: 1431 - protein, 242 aa, synthetic construct
RWEHRFELKPGRWVFVPTEEAREQGKEIKKQVEKRWKPPAYYYHLRQGGHVAALRCHLDNPWFAKVDLEDFFGQINRSRVTRALKGFFSYEEAWEMACESTVRRPPDSEFMLPYGFVQSPILATLAFDKSALGRYLRQLNKNDGLTVSVYMDDIVISGDDEEMLEQAFDELKQAAEKSGFPLNEEKTQGPASQITAFNIELSHNSMEITEERMAEFQEAYRQGNEHQKEGILGYVGSVNPAQ

SEQ ID NO: 1432 - protein, 242 aa, synthetic construct
RWEHRFELKPGRWVFVPTEEAREQGKEIKKQVEKRWKPPAYYYHLRQGGHVAALRCHLDNPWFAHVDLEDFFGQINRSRVTRALKGFFSNEEAWEMACESTVRRPPDSEFMLPYGFVQSPILATLAFDKSALGRYLRQLNKNDGLTVSVYMDDIVISGDDEEMLEQAFDELKQAAEKSGFPLNEEKTQGPASQITAFNIELSHNSMEITEERMAEFQEAYRQGNEHQKEGILGYVGSVNPAQ

SEQ ID NO: 1433 - protein, 242 aa, synthetic construct
RWEHRFELKPGRWVFVPTEEAREQGKEIKKQVEKRWKPPAYYYHLRQGGHVAALRCHLDNPWFAHVDLEDFFGQINRSRVTRALKGFFSSEEAWEMACESTVRRPPDSEFMLPYGFVQSPILATLAFDKSALGRYLRQLNKNDGLTVSVYMDDIVISGDDEEMLEQAFDELKQAAEKSGFPLNEEKTQGPASQITAFNIELSHNSMEITEERMAEFQEAYRQGNEHQKEGILGYVGSVNPAQ

SEQ ID NO: 1434 - protein, 242 aa, synthetic construct
RWEHRFELKPGCWVFVPTEEAREQGKEIKKQVEKRWKPPAYYYHLRQGGHVAALRCHLDNPWFAHVDLEDFFGQINRSRVTRALKGFFSYEEAWEMACCSTVRRPPDSEFMLPYGFVQSPILASLALDKSALGRYLRQLNKNDGLTLSVYMDDIVISGDDEEMLEQAFDELKQAAEKSGFPLNEEKTQGPASQITAFNIELSHNSMEITEERMAEFQEAYRQGNEHQKFGILGYVGSVNPAQ

SEQ ID NO: 1435 - protein, 242 aa, synthetic construct
RWEHRFELKPGRWVFVPTEEAREQGKEIKKQVEKRWKPPAYYYHLRQGGHVAALRCHLDNPWFAHVDLEDFFGQINRSRVTRALKGFFSSEEAWEMACESTVRRPPDSEFMLPYGFVQSPILASLALDKSPLGRYLRQLNKNDGLTVSVYMDDIVISGDDEEMLEQAFDELKQAAEKSGFPLNEEKTQGPASQITAFNIELSHNSMEITEERMAEFQEAYRQGNEHQKEGILGYVGSVNPAQ

SEQ ID NO: 1436 - protein, 242 aa, synthetic construct
RWEHRFELKPGRWVFVPTEEAREQGKEIKKQVEKRWKPPAYYYHLRQGGHVAALRCHLDHPWFAHVDLEDFFGQINRSRVTEALKGFKSYEEAWEMACESTVRRPPDSEFMLPYGFVQSPILASLALDKSALGRYLRQLNKNDGLTVSVYMDDIVISGDDEEMLEQAFDELKQAAEKSGFPLNEEKTQGPASQITAFNIELSHNSMEITEERMAEFQEAYRQGNEHNKEGILGYVGSVNPAQ

SEQ ID NO: 1437 - protein, 242 aa, synthetic construct
RWEHRFELKPGRWVFVPTEEAREQGKEIKKQVEKRWKPPAYYYHLRQGGHVAALRCHLDNPWFAHVDLEDFFGQINRSRVTRALKGFFGYEEAWEMACESTVRRPPDSEFMLPYGFVQSPIMASLALDKSALGRYLRQLNKNDGLTVSVYMDDIVISGDDEEMLEQAFDELKQAAEKSGFPLNEEKTQGPASQITAFNIELSHNSMEITEERMAEFQEAYRQGNEHQKEGILGYVGSVNPAQ

SEQ ID NO: 1438 - protein, 242 aa, synthetic construct
RWEHRFELKPGRWVFVPTEEAREQGKEIKKQVEKRWKPPAYYYHLRQGGHVAALRCHLDNPWFAHVDLEDFFGQINRSRVTRALKGFFSYEEAWEMACESTVRRPPDSEFMLPYGFVQSPILASLAMDKSPLGRYLRQLNKNDGLTVSVYMDDIVISGDDEEMLEQAFDELKQAAEKSGFPLNEEKTQGPASQITAFNIELSHNSMEITEERMAEFQEAYRQGNEHQKEGILGYVGSVNPAQ

SEQ ID NO: 1439 - protein, 242 aa, synthetic construct
RWEHRFELKPGRWVFVPTEEAREQGKEIKKQVEKRWKWPAYYYHLRQGGHVAALRCHLDNPWFAHVDLEDFFGQINRSRVTRALKGFFSYEEAWEMACESTVRRPPDSEFMLPYGFVQSPILASLALDKSALGRYLRQLNKNPGLTVSVYMDDIVISGDDEEMLEFAFDELKQAAEKSGFPLQEEKTQGPASQITAFNIELSHNSMEITEERMAEFQEAYRQGNEHQKEGILGYVGSVNPAQ

SEQ ID NO: 1440 - protein, 242 aa, synthetic construct
RWEHRFELKPGRWVFVPTEEAREQGKEIKKQVEKRWKPPAYYYHLRQGGHVAALRCHLDNPWFAHVDLEDFFGQINRSRVTRALKGFFSSEEAWEMACESTVRRPPDSEFMLPYGFVQSPILASLAMDKSALGRYLRQLNKNDGLTVSVYMDDIVISGDDEEMLEQAFDELKQAAEKSGFPLNEEKTQGPASQITAFNIELSHNSMEITEERMAEFQEAYRQGNEHQKEGILGYVGSVNPAQ

SEQ ID NO: 1441 - protein, 242 aa, synthetic construct
RWEHRFELKPGRWVFVPTEEAREQGKEIKKQVEKRWKPPAYYYHLRQGGHVAALRCHLDNPWFAHVDLEDFFGQINRSRVTRALKGFFSREEAWEMACESTVRRPPDSEFMLPYGFVQSPILASLAMDKSALGRYLRQLNKNDGLTVSVYMDDIVISGDDEEMLEQAFDELKQAAEKSGFPLNEEKTQGPASQITAFNIELSHNSMEITEERMAEFQEAYRQGNEHQKEGILGYVGSVNPAQ

SEQ ID NO: 1442 - protein, 242 aa, synthetic construct
RWEHRFELKPGRWVFVPTEEAREQGKEIKKQVEKRWKPPAYYYHLRQGGHVAALRCHLDNPWFAHVDLEDFFGQINRSRVTRALKGFFSNEEAWEMACESTVRRPPDSEFMLPYGFVQSPILASLAMDKSALGRYLRQLNKNDGLTVSVYMDDIVISGDDEEMLEQAFDELKQAAEKSGFPLNEEKTQGPASQITAFNIELSHNSMEITEERMAEFQEAYRQGNEHQKEGILGYVGSVNPAQ

SEQ ID NO: 1443 - protein, 242 aa, synthetic construct
RWEHRFELKPGRWVFVPTEEAREQGKEIKKQVEKRWKPPAYYYHLRQGGHVAALRCHLDNPWFAHVDLEDFFGQINRSRVTRALKGFFGSEEAWEMACESTVRRPPDSEFMLPYGFVQSPILASLALDKSALGRYLRQLNKNDGLTVSVYMDDIVISGDDEEMLEQAFDELKQAAEKSGFPLNEEKTQGPASQITAFNIELSHNSMEITEERMAEFQEAYRQGNEHQKEGILGYVGSVNPAQ

SEQ ID NO: 1444 - protein, 242 aa, synthetic construct
RWEHRFELKPGRWVFVPTEEAREQGKEIKKQVEKRWKPPAYYYHLRQGGHVAALRCHLDNPWFAHVDLEDFFGQINRSRVTRALKGFFGNEEAWEMACESTVRRPPDSEFMLPYGFVQSPILASLALDKSALGRYLRQLNKNDGLTVSVYMDDIVISGDDEEMLEQAFDELKQAAEKSGFPLNEEKTQGPASQITAFNIELSHNSMEITEERMAEFQEAYRQGNEHQKEGILGYVGSVNPAQ

SEQ ID NO: 1445 - protein, 242 aa, synthetic construct
RWEHRFELKPGRWVFVPTEEAREQGKEIKKQVEKRWKPPAYYYHLRQGGHVAALRCHLDNPWFAKVDLEDFFGQINRSRVTRALKGFFGYEEAWEMACESTVRRPPDSEFMLPYGFVQSPILASLALDKSALGRYLRQLNKNDGLTVSVYMDDIVISGDDEEMLEQAFDELKQAAEKSGFPLNEEKTQGPASQITAFNIELSHNSMEITEERMAEFQEAYRQGNEHQKEGILGYVGSVNPAQ

SEQ ID NO: 1446 - protein, 242 aa, synthetic construct
RWEHRFELKPGRWVFVPTEEAREQGKEIKKQVEKRWKPPAYYYHLRQGGHVAALRCHLDNQWFAHVDLEDFFGQINRSRVTRALKGFFSYEEAWEMSCESTVRRPPDSEFMLPYGFVQSPILASLALDKSALGRYLRQLNKNDGLTVSVYMDDIVISGDDEEMLEQAFDELYQAAEKSGFPLNEEKTQGPASQITAFNIELSHNSMEILEERMAEFQEAYRQGNEHQKEGILGYVGSVNPAQ

SEQ ID NO: 1447 - protein, 242 aa, synthetic construct
RWEHRFELKPGRWVFVPTYEAREQGKEIKKQVEKRWKPPAYYYHLRQGGHVAALRCHLDNPWFAHVDLEDFFGQINRSRVTRALKGFFSYEEAWEMACESTVRRPPDSEFMLPYGFVQSPILASLALDNSALGRYLRQLQKNDGLTVSVYMDDIVISGDDEEMLEQAFDELKQAAEKSGFPLNEEKTQGPASQITAFNIELSHNSMEITEERMAEFQECYRQGNEHQKEGILGYVGSVNPAQ

SEQ ID NO: 1448 - protein, 242 aa, synthetic construct
RWEHRFELKPGRWVFVPTEEAREQGKEIKKQVEKRWKPPAYYYHLRQGGHVAALRCHLDNPWFAHVDLEDFFGQINRSRVTAALKGFFSYEEAWAMACESTVRRPPDSEFMLPYGFVQSPILASLALDKSALGRYLRQLNKNDGLTVSVYMDDIVISGHDEEMLEQAFDELKQAAEKSGFPLNEEKTQGPASQISAFNIELSHNSMEITEERMAEFQEAYRQGNEHQKEGILGYVGSVNPAQ

SEQ ID NO: 1449 - protein, 242 aa, synthetic construct
RWEHRFELKPGRWVFVPTEEAREQGKEIKKQVEKRWKPPAYYYHLRQGGHVAALRCHLDNPWFAHVDLEDFFGQINRSRVTRALKGFFSPEEAWEMACESTVRRPPDSEFMLPYGFSQSPILASLALDKSALGRYLRQLNKNDGLTVSVYMDDIVISGGDEEMLEQAFDELKQAAEKSGFPLNEEKTQGPASQITAFNIELSHNSMEITEERMAELQEAYRQGNEHQKEGILGYVGSVNPAQ

SEQ ID NO: 1450 - protein, 1682 aa, synthetic construct
MKRTADGSEFESPKKKRKVDKKYSIGLDIGTNSVGWAVITDEYKVPSKKFKVLGNTDRHSIKKNLIGALLFDSGETAEATRLKRTARRRYTRRKNRICYLQEIFSNEMAKVDDSFFHRLEESFLVEEDKKHERHPIFGNIVDEVAYHEKYPTIYHLRKKLVDSTDKADLRLIYLALAHMIKFRGHFLIEGDLNPDNSDVDKLFIQLVQTYNQLFEENPINASGVDAKAILSARLSKSRRLENLIAQLPGEKKNGLFGNLIALSLGLTPNFKSNFDLAEDAKLQLSKDTYDDDLDNLLAQIGDQYADLFLAAKNLSDAILLSDILRVNTEITKAPLSASMIKRYDEHHQDLTLLKALVRQQLPEKYKEIFFDQSKNGYAGYIDGGASQEEFYKFIKPILEKMDGTEELLVKLNREDLLRKQRTFDNGSIPHQIHLGELHAILRRQEDFYPFLKDNREKIEKILTFRIPYYVGPLARGNSRFAWMTRKSEETITPWNFEEVVDKGASAQSFIERMTNFDKNLPNEKVLPKHSLLYEYFTVYNELTKVKYVTEGMRKPAFLSGEQKKAIVDLLFKTNRKVTVKQLKEDYFKKIECFDSVEISGVEDRFNASLGTYHDLLKIIKDKDFLDNEENEDILEDIVLTLTLFEDREMIEERLKTYAHLFDDKVMKQLKRRRYTGWGRLSRKLINGIRDKQSGKTILDFLKSDGFANRNFMQLIHDDSLTFKEDIQKAQVSGQGDSLHEHIANLAGSPAIKKGILQTVKVVDELVKVMGRHKPENIVIEMARENQTTQKGQKNSRERMKRIEEGIKELGSQILKEHPVENTQLQNEKLYLYYLQNGRDMYVDQELDINRLSDYDVDAIVPQSFLKDDSIDNKVLTRSDKNRGKSDNVPSEEVVKKMKNYWRQLLNAKLITQRKFDNLTKAERGGLSELDKAGFIKRQLVETRQITKHVAQILDSRMNTKYDENDKLIREVKVITLKSKLVSDFRKDFQFYKVREINNYHHAHDAYLNAVVGTALIKKYPKLESEFVYGDYKVYDVRKMIAKSEQEIGKATAKYFFYSNIMNFFKTEITLANGEIRKRPLIETNGETGEIVWDKGRDFATVRKVLSMPQVNIVKKTEVQTGGFSKESILPKRNSDKLIARKKDWDPKKYGGFDSPTVAYSVLVVAKVEKGKSKKLKSVKELLGITIMERSSFEKNPIDFLEAKGYKEVKKDLIIKLPKYSLFELENGRKRMLASAGELQKGNELALPSKYVNFLYLASHYEKLKGSPEDNEQKQLFVEQHKHYLDEIIEQISEFSKRVILADANLDKVLSAYNKHRDKPIREQAENIIHLFTLTNLGAPAAFKYFDTTIDRKRYTSTKEVLDATLIHQSITGLYETRIDLSQLGGDSGGSSGGSSGSETPGTSESATPESSGGSSGGSSRWEHRFELQPGRWVFVPTEEAREQGKEIKKQVEKRWKPPAYYYHLRQGGHVAALRCHLDNPWFAHVDLEDFFGQINRSRVTRALKGFFSYEEAWEMACESTVRRPPDSEFMLPYGFVQSPILASLALDKSALGRYLRQLNKNDGLTVSVYMDDIVISGDDEEMLEQAFDELKQAAEKSGFPLNEEKTQGPASQITAFNIELSHNSMEITEERMAEFQEAYRQGNEHQKEGILGYVGSVNPAQSGGSKRTADGSEFEPKKKRKV

SEQ ID NO: 1451 - protein, 1682 aa, synthetic construct
MKRTADGSEFESPKKKRKVDKKYSIGLDIGTNSVGWAVITDEYKVPSKKFKVLGNTDRHSIKKNLIGALLFDSGETAEATRLKRTARRRYTRRKNRICYLQEIFSNEMAKVDDSFFHRLEESFLVEEDKKHERHPIFGNIVDEVAYHEKYPTIYHLRKKLVDSTDKADLRLIYLALAHMIKFRGHFLIEGDLNPDNSDVDKLFIQLVQTYNQLFEENPINASGVDAKAILSARLSKSRRLENLIAQLPGEKKNGLFGNLIALSLGLTPNFKSNFDLAEDAKLQLSKDTYDDDLDNLLAQIGDQYADLFLAAKNLSDAILLSDILRVNTEITKAPLSASMIKRYDEHHQDLTLLKALVRQQLPEKYKEIFFDQSKNGYAGYIDGGASQEEFYKFIKPILEKMDGTEELLVKLNREDLLRKQRTFDNGSIPHQIHLGELHAILRRQEDFYPFLKDNREKIEKILTFRIPYYVGPLARGNSRFAWMTRKSEETITPWNFEEVVDKGASAQSFIERMTNFDKNLPNEKVLPKHSLLYEYFTVYNELTKVKYVTEGMRKPAFLSGEQKKAIVDLLFKTNRKVTVKQLKEDYFKKIECFDSVEISGVEDRFNASLGTYHDLLKIIKDKDFLDNEENEDILEDIVLTLTLFEDREMIEERLKTYAHLFDDKVMKQLKRRRYTGWGRLSRKLINGIRDKQSGKTILDFLKSDGFANRNFMQLIHDDSLTFKEDIQKAQVSGQGDSLHEHIANLAGSPAIKKGILQTVKVVDELVKVMGRHKPENIVIEMARENQTTQKGQKNSRERMKRIEEGIKELGSQILKEHPVENTQLQNEKLYLYYLQNGRDMYVDQELDINRLSDYDVDAIVPQSFLKDDSIDNKVLTRSDKNRGKSDNVPSEEVVKKMKNYWRQLLNAKLITQRKFDNLTKAERGGLSELDKAGFIKRQLVETRQITKHVAQILDSRMNTKYDENDKLIREVKVITLKSKLVSDFRKDFQFYKVREINNYHHAHDAYLNAVVGTALIKKYPKLESEFVYGDYKVYDVRKMIAKSEQEIGKATAKYFFYSNIMNFFKTEITLANGEIRKRPLIETNGETGEIVWDKGRDFATVRKVLSMPQVNIVKKTEVQTGGFSKESILPKRNSDKLIARKKDWDPKKYGGFDSPTVAYSVLVVAKVEKGKSKKLKSVKELLGITIMERSSFEKNPIDFLEAKGYKEVKKDLIIKLPKYSLFELENGRKRMLASAGELQKGNELALPSKYVNFLYLASHYEKLKGSPEDNEQKQLFVEQHKHYLDEIIEQISEFSKRVILADANLDKVLSAYNKHRDKPIREQAENIIHLFTLTNLGAPAAFKYFDTTIDRKRYTSTKEVLDATLIHQSITGLYETRIDLSQLGGDSGGSSGGSSGSETPGTSESATPESSGGSSGGSSRWEHRFELKPGRWVFVPTEEAREQGKEIKKQVEKRWKPPAYYYHLRQGGHVAALRCHLDNPWFAHVDLEDFFGQINRSRVTEALKGFFSYEEAWEMACESTVRRPPDSEFMLPYGFVQSPILASLALDKSALGRYLRQLNKNDGLTVSVYMDDIVISGDDEEMLEQAFDELKQAAEKSGFPLNEEKTQGPASQITAFNIELSHNSMEITEERMAEFQEAYRQGNEHQKEGILGYVGSVNPAQSGGSKRTADGSEFEPKKKRKV

SEQ ID NO: 1452 - protein, 1682 aa, synthetic construct
MKRTADGSEFESPKKKRKVDKKYSIGLDIGTNSVGWAVITDEYKVPSKKFKVLGNTDRHSIKKNLIGALLFDSGETAEATRLKRTARRRYTRRKNRICYLQEIFSNEMAKVDDSFFHRLEESFLVEEDKKHERHPIFGNIVDEVAYHEKYPTIYHLRKKLVDSTDKADLRLIYLALAHMIKFRGHFLIEGDLNPDNSDVDKLFIQLVQTYNQLFEENPINASGVDAKAILSARLSKSRRLENLIAQLPGEKKNGLFGNLIALSLGLTPNFKSNFDLAEDAKLQLSKDTYDDDLDNLLAQIGDQYADLFLAAKNLSDAILLSDILRVNTEITKAPLSASMIKRYDEHHQDLTLLKALVRQQLPEKYKEIFFDQSKNGYAGYIDGGASQEEFYKFIKPILEKMDGTEELLVKLNREDLLRKQRTFDNGSIPHQIHLGELHAILRRQEDFYPFLKDNREKIEKILTFRIPYYVGPLARGNSRFAWMTRKSEETITPWNFEEVVDKGASAQSFIERMTNFDKNLPNEKVLPKHSLLYEYFTVYNELTKVKYVTEGMRKPAFLSGEQKKAIVDLLFKTNRKVTVKQLKEDYFKKIECFDSVEISGVEDRFNASLGTYHDLLKIIKDKDFLDNEENEDILEDIVLTLTLFEDREMIEERLKTYAHLFDDKVMKQLKRRRYTGWGRLSRKLINGIRDKQSGKTILDFLKSDGFANRNFMQLIHDDSLTFKEDIQKAQVSGQGDSLHEHIANLAGSPAIKKGILQTVKVVDELVKVMGRHKPENIVIEMARENQTTQKGQKNSRERMKRIEEGIKELGSQILKEHPVENTQLQNEKLYLYYLQNGRDMYVDQELDINRLSDYDVDAIVPQSFLKDDSIDNKVLTRSDKNRGKSDNVPSEEVVKKMKNYWRQLLNAKLITQRKFDNLTKAERGGLSELDKAGFIKRQLVETRQITKHVAQILDSRMNTKYDENDKLIREVKVITLKSKLVSDFRKDFQFYKVREINNYHHAHDAYLNAVVGTALIKKYPKLESEFVYGDYKVYDVRKMIAKSEQEIGKATAKYFFYSNIMNFFKTEITLANGEIRKRPLIETNGETGEIVWDKGRDFATVRKVLSMPQVNIVKKTEVQTGGFSKESILPKRNSDKLIARKKDWDPKKYGGFDSPTVAYSVLVVAKVEKGKSKKLKSVKELLGITIMERSSFEKNPIDFLEAKGYKEVKKDLIIKLPKYSLFELENGRKRMLASAGELQKGNELALPSKYVNFLYLASHYEKLKGSPEDNEQKQLFVEQHKHYLDEIIEQISEFSKRVILADANLDKVLSAYNKHRDKPIREQAENIIHLFTLTNLGAPAAFKYFDTTIDRKRYTSTKEVLDATLIHQSITGLYETRIDLSQLGGDSGGSSGGSSGSETPGTSESATPESSGGSSGGSSRWEHRFELKPGRWVFVPTEEAREQGKEIKKQVEKRWKPPAYYYHLRQGGHVAALRCHLDNPWFAHVDLEDFFGQINRSRVTRALKGFFGYEEAWEMACESTVRRPPDSEFMLPYGFVQSPILASLALDKSALGRYLRQLNKNDGLTVSVYMDDIVISGDDEEMLEQAFDELKQAAEKSGFPLNEEKTQGPASQITAFNIELSHNSMEITEERMAEFQEAYRQGNEHQKEGILGYVGSVNPAQSGGSKRTADGSEFEPKKKRKV

SEQ ID NO: 1453 - protein, 1682 aa, synthetic construct
MKRTADGSEFESPKKKRKVDKKYSIGLDIGTNSVGWAVITDEYKVPSKKFKVLGNTDRHSIKKNLIGALLFDSGETAEATRLKRTARRRYTRRKNRICYLQEIFSNEMAKVDDSFFHRLEESFLVEEDKKHERHPIFGNIVDEVAYHEKYPTIYHLRKKLVDSTDKADLRLIYLALAHMIKFRGHFLIEGDLNPDNSDVDKLFIQLVQTYNQLFEENPINASGVDAKAILSARLSKSRRLENLIAQLPGEKKNGLFGNLIALSLGLTPNFKSNFDLAEDAKLQLSKDTYDDDLDNLLAQIGDQYADLFLAAKNLSDAILLSDILRVNTEITKAPLSASMIKRYDEHHQDLTLLKALVRQQLPEKYKEIFFDQSKNGYAGYIDGGASQEEFYKFIKPILEKMDGTEELLVKLNREDLLRKQRTFDNGSIPHQIHLGELHAILRRQEDFYPFLKDNREKIEKILTFRIPYYVGPLARGNSRFAWMTRKSEETITPWNFEEVVDKGASAQSFIERMTNFDKNLPNEKVLPKHSLLYEYFTVYNELTKVKYVTEGMRKPAFLSGEQKKAIVDLLFKTNRKVTVKQLKEDYFKKIECFDSVEISGVEDRFNASLGTYHDLLKIIKDKDFLDNEENEDILEDIVLTLTLFEDREMIEERLKTYAHLFDDKVMKQLKRRRYTGWGRLSRKLINGIRDKQSGKTILDFLKSDGFANRNFMQLIHDDSLTFKEDIQKAQVSGQGDSLHEHIANLAGSPAIKKGILQTVKVVDELVKVMGRHKPENIVIEMARENQTTQKGQKNSRERMKRIEEGIKELGSQILKEHPVENTQLQNEKLYLYYLQNGRDMYVDQELDINRLSDYDVDAIVPQSFLKDDSIDNKVLTRSDKNRGKSDNVPSEEVVKKMKNYWRQLLNAKLITQRKFDNLTKAERGGLSELDKAGFIKRQLVETRQITKHVAQILDSRMNTKYDENDKLIREVKVITLKSKLVSDFRKDFQFYKVREINNYHHAHDAYLNAVVGTALIKKYPKLESEFVYGDYKVYDVRKMIAKSEQEIGKATAKYFFYSNIMNFFKTEITLANGEIRKRPLIETNGETGEIVWDKGRDFATVRKVLSMPQVNIVKKTEVQTGGFSKESILPKRNSDKLIARKKDWDPKKYGGFDSPTVAYSVLVVAKVEKGKSKKLKSVKELLGITIMERSSFEKNPIDFLEAKGYKEVKKDLIIKLPKYSLFELENGRKRMLASAGELQKGNELALPSKYVNFLYLASHYEKLKGSPEDNEQKQLFVEQHKHYLDEIIEQISEFSKRVILADANLDKVLSAYNKHRDKPIREQAENIIHLFTLTNLGAPAAFKYFDTTIDRKRYTSTKEVLDATLIHQSITGLYETRIDLSQLGGDSGGSSGGSSGSETPGTSESATPESSGGSSGGSSRWEHRFELKPGRWVFVPTEEAREQGKEIKKQVEKRWKPPAYYYHLRQGGHVAALRCHLDNPWFAHVDLEDFFGQINRSRVTRALKGFFSREEAWEMACESTVRRPPDSEFMLPYGFVQSPILASLALDKSALGRYLRQLNKNDGLTVSVYMDDIVISGDDEEMLEQAFDELKQAAEKSGFPLNEEKTQGPASQITAFNIELSHNSMEITEERMAEFQEAYRQGNEHQKEGILGYVGSVNPAQSGGSKRTADGSEFEPKKKRKV

SEQ ID NO: 1454 - protein, 1682 aa, synthetic construct
MKRTADGSEFESPKKKRKVDKKYSIGLDIGTNSVGWAVITDEYKVPSKKFKVLGNTDRHSIKKNLIGALLFDSGETAEATRLKRTARRRYTRRKNRICYLQEIFSNEMAKVDDSFFHRLEESFLVEEDKKHERHPIFGNIVDEVAYHEKYPTIYHLRKKLVDSTDKADLRLIYLALAHMIKFRGHFLIEGDLNPDNSDVDKLFIQLVQTYNQLFEENPINASGVDAKAILSARLSKSRRLENLIAQLPGEKKNGLFGNLIALSLGLTPNFKSNFDLAEDAKLQLSKDTYDDDLDNLLAQIGDQYADLFLAAKNLSDAILLSDILRVNTEITKAPLSASMIKRYDEHHQDLTLLKALVRQQLPEKYKEIFFDQSKNGYAGYIDGGASQEEFYKFIKPILEKMDGTEELLVKLNREDLLRKQRTFDNGSIPHQIHLGELHAILRRQEDFYPFLKDNREKIEKILTFRIPYYVGPLARGNSRFAWMTRKSEETITPWNFEEVVDKGASAQSFIERMTNFDKNLPNEKVLPKHSLLYEYFTVYNELTKVKYVTEGMRKPAFLSGEQKKAIVDLLFKTNRKVTVKQLKEDYFKKIECFDSVEISGVEDRFNASLGTYHDLLKIIKDKDFLDNEENEDILEDIVLTLTLFEDREMIEERLKTYAHLFDDKVMKQLKRRRYTGWGRLSRKLINGIRDKQSGKTILDFLKSDGFANRNFMQLIHDDSLTFKEDIQKAQVSGQGDSLHEHIANLAGSPAIKKGILQTVKVVDELVKVMGRHKPENIVIEMARENQTTQKGQKNSRERMKRIEEGIKELGSQILKEHPVENTQLQNEKLYLYYLQNGRDMYVDQELDINRLSDYDVDAIVPQSFLKDDSIDNKVLTRSDKNRGKSDNVPSEEVVKKMKNYWRQLLNAKLITQRKFDNLTKAERGGLSELDKAGFIKRQLVETRQITKHVAQILDSRMNTKYDENDKLIREVKVITLKSKLVSDFRKDFQFYKVREINNYHHAHDAYLNAVVGTALIKKYPKLESEFVYGDYKVYDVRKMIAKSEQEIGKATAKYFFYSNIMNFFKTEITLANGEIRKRPLIETNGETGEIVWDKGRDFATVRKVLSMPQVNIVKKTEVQTGGFSKESILPKRNSDKLIARKKDWDPKKYGGFDSPTVAYSVLVVAKVEKGKSKKLKSVKELLGITIMERSSFEKNPIDFLEAKGYKEVKKDLIIKLPKYSLFELENGRKRMLASAGELQKGNELALPSKYVNFLYLASHYEKLKGSPEDNEQKQLFVEQHKHYLDEIIEQISEFSKRVILADANLDKVLSAYNKHRDKPIREQAENIIHLFTLTNLGAPAAFKYFDTTIDRKRYTSTKEVLDATLIHQSITGLYETRIDLSQLGGDSGGSSGGSSGSETPGTSESATPESSGGSSGGSSRWEHRFELKPGRWVFVPTEEAREQGKEIKKQVEKRWKPPAYYYHLRQGGHVAALRCHLDNPWFAHVDLEDFFGQINRSRVTRALKGFFSDEEAWEMACESTVRRPPDSEFMLPYGFVQSPILASLALDKSALGRYLRQLNKNDGLTVSVYMDDIVISGDDEEMLEQAFDELKQAAEKSGFPLNEEKTQGPASQITAFNIELSHNSMEITEERMAEFQEAYRQGNEHQKEGILGYVGSVNPAQSGGSKRTADGSEFEPKKKRKV

SEQ ID NO: 1455 - protein, 1682 aa, synthetic construct
MKRTADGSEFESPKKKRKVDKKYSIGLDIGTNSVGWAVITDEYKVPSKKFKVLGNTDRHSIKKNLIGALLFDSGETAEATRLKRTARRRYTRRKNRICYLQEIFSNEMAKVDDSFFHRLEESFLVEEDKKHERHPIFGNIVDEVAYHEKYPTIYHLRKKLVDSTDKADLRLIYLALAHMIKFRGHFLIEGDLNPDNSDVDKLFIQLVQTYNQLFEENPINASGVDAKAILSARLSKSRRLENLIAQLPGEKKNGLFGNLIALSLGLTPNFKSNFDLAEDAKLQLSKDTYDDDLDNLLAQIGDQYADLFLAAKNLSDAILLSDILRVNTEITKAPLSASMIKRYDEHHQDLTLLKALVRQQLPEKYKEIFFDQSKNGYAGYIDGGASQEEFYKFIKPILEKMDGTEELLVKLNREDLLRKQRTFDNGSIPHQIHLGELHAILRRQEDFYPFLKDNREKIEKILTFRIPYYVGPLARGNSRFAWMTRKSEETITPWNFEEVVDKGASAQSFIERMTNFDKNLPNEKVLPKHSLLYEYFTVYNELTKVKYVTEGMRKPAFLSGEQKKAIVDLLFKTNRKVTVKQLKEDYFKKIECFDSVEISGVEDRFNASLGTYHDLLKIIKDKDFLDNEENEDILEDIVLTLTLFEDREMIEERLKTYAHLFDDKVMKQLKRRRYTGWGRLSRKLINGIRDKQSGKTILDFLKSDGFANRNFMQLIHDDSLTFKEDIQKAQVSGQGDSLHEHIANLAGSPAIKKGILQTVKVVDELVKVMGRHKPENIVIEMARENQTTQKGQKNSRERMKRIEEGIKELGSQILKEHPVENTQLQNEKLYLYYLQNGRDMYVDQELDINRLSDYDVDAIVPQSFLKDDSIDNKVLTRSDKNRGKSDNVPSEEVVKKMKNYWRQLLNAKLITQRKFDNLTKAERGGLSELDKAGFIKRQLVETRQITKHVAQILDSRMNTKYDENDKLIREVKVITLKSKLVSDFRKDFQFYKVREINNYHHAHDAYLNAVVGTALIKKYPKLESEFVYGDYKVYDVRKMIAKSEQEIGKATAKYFFYSNIMNFFKTEITLANGEIRKRPLIETNGETGEIVWDKGRDFATVRKVLSMPQVNIVKKTEVQTGGFSKESILPKRNSDKLIARKKDWDPKKYGGFDSPTVAYSVLVVAKVEKGKSKKLKSVKELLGITIMERSSFEKNPIDFLEAKGYKEVKKDLIIKLPKYSLFELENGRKRMLASAGELQKGNELALPSKYVNFLYLASHYEKLKGSPEDNEQKQLFVEQHKHYLDEIIEQISEFSKRVILADANLDKVLSAYNKHRDKPIREQAENIIHLFTLTNLGAPAAFKYFDTTIDRKRYTSTKEVLDATLIHQSITGLYETRIDLSQLGGDSGGSSGGSSGSETPGTSESATPESSGGSSGGSSRWEHRFELKPGRWVFVPTEEAREQGKEIKKQVEKRWKPPAYYYHLRQGGHVAALRCHLDNPWFAHVDLEDFFGQINRSRVTRALKGFFSKEEAWEMACESTVRRPPDSEFMLPYGFVQSPILASLALDKSALGRYLRQLNKNDGLTVSVYMDDIVISGDDEEMLEQAFDELKQAAEKSGFPLNEEKTQGPASQITAFNIELSHNSMEITEERMAEFQEAYRQGNEHQKEGILGYVGSVNPAQSGGSKRTADGSEFEPKKKRKV

SEQ ID NO: 1456 - protein, 1682 aa, synthetic construct
MKRTADGSEFESPKKKRKVDKKYSIGLDIGTNSVGWAVITDEYKVPSKKFKVLGNTDRHSIKKNLIGALLFDSGETAEATRLKRTARRRYTRRKNRICYLQEIFSNEMAKVDDSFFHRLEESFLVEEDKKHERHPIFGNIVDEVAYHEKYPTIYHLRKKLVDSTDKADLRLIYLALAHMIKFRGHFLIEGDLNPDNSDVDKLFIQLVQTYNQLFEENPINASGVDAKAILSARLSKSRRLENLIAQLPGEKKNGLFGNLIALSLGLTPNFKSNFDLAEDAKLQLSKDTYDDDLDNLLAQIGDQYADLFLAAKNLSDAILLSDILRVNTEITKAPLSASMIKRYDEHHQDLTLLKALVRQQLPEKYKEIFFDQSKNGYAGYIDGGASQEEFYKFIKPILEKMDGTEELLVKLNREDLLRKQRTFDNGSIPHQIHLGELHAILRRQEDFYPFLKDNREKIEKILTFRIPYYVGPLARGNSRFAWMTRKSEETITPWNFEEVVDKGASAQSFIERMTNFDKNLPNEKVLPKHSLLYEYFTVYNELTKVKYVTEGMRKPAFLSGEQKKAIVDLLFKTNRKVTVKQLKEDYFKKIECFDSVEISGVEDRFNASLGTYHDLLKIIKDKDFLDNEENEDILEDIVLTLTLFEDREMIEERLKTYAHLFDDKVMKQLKRRRYTGWGRLSRKLINGIRDKQSGKTILDFLKSDGFANRNFMQLIHDDSLTFKEDIQKAQVSGQGDSLHEHIANLAGSPAIKKGILQTVKVVDELVKVMGRHKPENIVIEMARENQTTQKGQKNSRERMKRIEEGIKELGSQILKEHPVENTQLQNEKLYLYYLQNGRDMYVDQELDINRLSDYDVDAIVPQSFLKDDSIDNKVLTRSDKNRGKSDNVPSEEVVKKMKNYWRQLLNAKLITQRKFDNLTKAERGGLSELDKAGFIKRQLVETRQITKHVAQILDSRMNTKYDENDKLIREVKVITLKSKLVSDFRKDFQFYKVREINNYHHAHDAYLNAVVGTALIKKYPKLESEFVYGDYKVYDVRKMIAKSEQEIGKATAKYFFYSNIMNFFKTEITLANGEIRKRPLIETNGETGEIVWDKGRDFATVRKVLSMPQVNIVKKTEVQTGGFSKESILPKRNSDKLIARKKDWDPKKYGGFDSPTVAYSVLVVAKVEKGKSKKLKSVKELLGITIMERSSFEKNPIDFLEAKGYKEVKKDLIIKLPKYSLFELENGRKRMLASAGELQKGNELALPSKYVNFLYLASHYEKLKGSPEDNEQKQLFVEQHKHYLDEIIEQISEFSKRVILADANLDKVLSAYNKHRDKPIREQAENIIHLFTLTNLGAPAAFKYFDTTIDRKRYTSTKEVLDATLIHQSITGLYETRIDLSQLGGDSGGSSGGSSGSETPGTSESATPESSGGSSGGSSRWEHRFELKPGRWVFVPTEEAREQGKEIKKQVEKRWKPPAYYYHLRQGGHVAALRCHLDNPWFAHVDLEDFFGQINRSRVTRALKGFFSNEEAWEMACESTVRRPPDSEFMLPYGFVQSPILASLALDKSALGRYLRQLNKNDGLTVSVYMDDIVISGDDEEMLEQAFDELKQAAEKSGFPLNEEKTQGPASQITAFNIELSHNSMEITEERMAEFQEAYRQGNEHQKEGILGYVGSVNPAQSGGSKRTADGSEFEPKKKRKV

SEQ ID NO: 1457 - protein, 1682 aa, synthetic construct
MKRTADGSEFESPKKKRKVDKKYSIGLDIGTNSVGWAVITDEYKVPSKKFKVLGNTDRHSIKKNLIGALLFDSGETAEATRLKRTARRRYTRRKNRICYLQEIFSNEMAKVDDSFFHRLEESFLVEEDKKHERHPIFGNIVDEVAYHEKYPTIYHLRKKLVDSTDKADLRLIYLALAHMIKFRGHFLIEGDLNPDNSDVDKLFIQLVQTYNQLFEENPINASGVDAKAILSARLSKSRRLENLIAQLPGEKKNGLFGNLIALSLGLTPNFKSNFDLAEDAKLQLSKDTYDDDLDNLLAQIGDQYADLFLAAKNLSDAILLSDILRVNTEITKAPLSASMIKRYDEHHQDLTLLKALVRQQLPEKYKEIFFDQSKNGYAGYIDGGASQEEFYKFIKPILEKMDGTEELLVKLNREDLLRKQRTFDNGSIPHQIHLGELHAILRRQEDFYPFLKDNREKIEKILTFRIPYYVGPLARGNSRFAWMTRKSEETITPWNFEEVVDKGASAQSFIERMTNFDKNLPNEKVLPKHSLLYEYFTVYNELTKVKYVTEGMRKPAFLSGEQKKAIVDLLFKTNRKVTVKQLKEDYFKKIECFDSVEISGVEDRFNASLGTYHDLLKIIKDKDFLDNEENEDILEDIVLTLTLFEDREMIEERLKTYAHLFDDKVMKQLKRRRYTGWGRLSRKLINGIRDKQSGKTILDFLKSDGFANRNFMQLIHDDSLTFKEDIQKAQVSGQGDSLHEHIANLAGSPAIKKGILQTVKVVDELVKVMGRHKPENIVIEMARENQTTQKGQKNSRERMKRIEEGIKELGSQILKEHPVENTQLQNEKLYLYYLQNGRDMYVDQELDINRLSDYDVDAIVPQSFLKDDSIDNKVLTRSDKNRGKSDNVPSEEVVKKMKNYWRQLLNAKLITQRKFDNLTKAERGGLSELDKAGFIKRQLVETRQITKHVAQILDSRMNTKYDENDKLIREVKVITLKSKLVSDFRKDFQFYKVREINNYHHAHDAYLNAVVGTALIKKYPKLESEFVYGDYKVYDVRKMIAKSEQEIGKATAKYFFYSNIMNFFKTEITLANGEIRKRPLIETNGETGEIVWDKGRDFATVRKVLSMPQVNIVKKTEVQTGGFSKESILPKRNSDKLIARKKDWDPKKYGGFDSPTVAYSVLVVAKVEKGKSKKLKSVKELLGITIMERSSFEKNPIDFLEAKGYKEVKKDLIIKLPKYSLFELENGRKRMLASAGELQKGNELALPSKYVNFLYLASHYEKLKGSPEDNEQKQLFVEQHKHYLDEIIEQISEFSKRVILADANLDKVLSAYNKHRDKPIREQAENIIHLFTLTNLGAPAAFKYFDTTIDRKRYTSTKEVLDATLIHQSITGLYETRIDLSQLGGDSGGSSGGSSGSETPGTSESATPESSGGSSGGSSRWEHRFELKPGRWVFVPTEEAREQGKEIKKQVEKRWKPPAYYYHLRQGGHVAALRCHLDNPWFAHVDLEDFFGQINRSRVTRALKGFFSSEEAWEMACESTVRRPPDSEFMLPYGFVQSPILASLALDKSALGRYLRQLNKNDGLTVSVYMDDIVISGDDEEMLEQAFDELKQAAEKSGFPLNEEKTQGPASQITAFNIELSHNSMEITEERMAEFQEAYRQGNEHQKEGILGYVGSVNPAQSGGSKRTADGSEFEPKKKRKV

SEQ ID NO: 1458 - protein, 1682 aa, synthetic construct
MKRTADGSEFESPKKKRKVDKKYSIGLDIGTNSVGWAVITDEYKVPSKKFKVLGNTDRHSIKKNLIGALLFDSGETAEATRLKRTARRRYTRRKNRICYLQEIFSNEMAKVDDSFFHRLEESFLVEEDKKHERHPIFGNIVDEVAYHEKYPTIYHLRKKLVDSTDKADLRLIYLALAHMIKFRGHFLIEGDLNPDNSDVDKLFIQLVQTYNQLFEENPINASGVDAKAILSARLSKSRRLENLIAQLPGEKKNGLFGNLIALSLGLTPNFKSNFDLAEDAKLQLSKDTYDDDLDNLLAQIGDQYADLFLAAKNLSDAILLSDILRVNTEITKAPLSASMIKRYDEHHQDLTLLKALVRQQLPEKYKEIFFDQSKNGYAGYIDGGASQEEFYKFIKPILEKMDGTEELLVKLNREDLLRKQRTFDNGSIPHQIHLGELHAILRRQEDFYPFLKDNREKIEKILTFRIPYYVGPLARGNSRFAWMTRKSEETITPWNFEEVVDKGASAQSFIERMTNFDKNLPNEKVLPKHSLLYEYFTVYNELTKVKYVTEGMRKPAFLSGEQKKAIVDLLFKTNRKVTVKQLKEDYFKKIECFDSVEISGVEDRFNASLGTYHDLLKIIKDKDFLDNEENEDILEDIVLTLTLFEDREMIEERLKTYAHLFDDKVMKQLKRRRYTGWGRLSRKLINGIRDKQSGKTILDFLKSDGFANRNFMQLIHDDSLTFKEDIQKAQVSGQGDSLHEHIANLAGSPAIKKGILQTVKVVDELVKVMGRHKPENIVIEMARENQTTQKGQKNSRERMKRIEEGIKELGSQILKEHPVENTQLQNEKLYLYYLQNGRDMYVDQELDINRLSDYDVDAIVPQSFLKDDSIDNKVLTRSDKNRGKSDNVPSEEVVKKMKNYWRQLLNAKLITQRKFDNLTKAERGGLSELDKAGFIKRQLVETRQITKHVAQILDSRMNTKYDENDKLIREVKVITLKSKLVSDFRKDFQFYKVREINNYHHAHDAYLNAVVGTALIKKYPKLESEFVYGDYKVYDVRKMIAKSEQEIGKATAKYFFYSNIMNFFKTEITLANGEIRKRPLIETNGETGEIVWDKGRDFATVRKVLSMPQVNIVKKTEVQTGGFSKESILPKRNSDKLIARKKDWDPKKYGGFDSPTVAYSVLVVAKVEKGKSKKLKSVKELLGITIMERSSFEKNPIDFLEAKGYKEVKKDLIIKLPKYSLFELENGRKRMLASAGELQKGNELALPSKYVNFLYLASHYEKLKGSPEDNEQKQLFVEQHKHYLDEIIEQISEFSKRVILADANLDKVLSAYNKHRDKPIREQAENIIHLFTLTNLGAPAAFKYFDTTIDRKRYTSTKEVLDATLIHQSITGLYETRIDLSQLGGDSGGSSGGSSGSETPGTSESATPESSGGSSGGSSRWEHRFELKPGRWVFVPTEEAREQGKEIKKQVEKRWKPPAYYYHLRQGGHVAALRCHLDNPWFAHVDLEDFFGQINRSRVTRALKGFFSYEEAEEMACESTVRRPPDSEFMLPYGFVQSPILASLALDKSALGRYLRQLNKNDGLTVSVYMDDIVISGDDEEMLEQAFDELKQAAEKSGFPLNEEKTQGPASQITAFNIELSHNSMEITEERMAEFQEAYRQGNEHQKEGILGYVGSVNPAQSGGSKRTADGSEFEPKKKRKV

SEQ ID NO: 1459 - protein, 1682 aa, synthetic construct
MKRTADGSEFESPKKKRKVDKKYSIGLDIGTNSVGWAVITDEYKVPSKKFKVLGNTDRHSIKKNLIGALLFDSGETAEATRLKRTARRRYTRRKNRICYLQEIFSNEMAKVDDSFFHRLEESFLVEEDKKHERHPIFGNIVDEVAYHEKYPTIYHLRKKLVDSTDKADLRLIYLALAHMIKFRGHFLIEGDLNPDNSDVDKLFIQLVQTYNQLFEENPINASGVDAKAILSARLSKSRRLENLIAQLPGEKKNGLFGNLIALSLGLTPNFKSNFDLAEDAKLQLSKDTYDDDLDNLLAQIGDQYADLFLAAKNLSDAILLSDILRVNTEITKAPLSASMIKRYDEHHQDLTLLKALVRQQLPEKYKEIFFDQSKNGYAGYIDGGASQEEFYKFIKPILEKMDGTEELLVKLNREDLLRKQRTFDNGSIPHQIHLGELHAILRRQEDFYPFLKDNREKIEKILTFRIPYYVGPLARGNSRFAWMTRKSEETITPWNFEEVVDKGASAQSFIERMTNFDKNLPNEKVLPKHSLLYEYFTVYNELTKVKYVTEGMRKPAFLSGEQKKAIVDLLFKTNRKVTVKQLKEDYFKKIECFDSVEISGVEDRFNASLGTYHDLLKIIKDKDFLDNEENEDILEDIVLTLTLFEDREMIEERLKTYAHLFDDKVMKQLKRRRYTGWGRLSRKLINGIRDKQSGKTILDFLKSDGFANRNFMQLIHDDSLTFKEDIQKAQVSGQGDSLHEHIANLAGSPAIKKGILQTVKVVDELVKVMGRHKPENIVIEMARENQTTQKGQKNSRERMKRIEEGIKELGSQILKEHPVENTQLQNEKLYLYYLQNGRDMYVDQELDINRLSDYDVDAIVPQSFLKDDSIDNKVLTRSDKNRGKSDNVPSEEVVKKMKNYWRQLLNAKLITQRKFDNLTKAERGGLSELDKAGFIKRQLVETRQITKHVAQILDSRMNTKYDENDKLIREVKVITLKSKLVSDFRKDFQFYKVREINNYHHAHDAYLNAVVGTALIKKYPKLESEFVYGDYKVYDVRKMIAKSEQEIGKATAKYFFYSNIMNFFKTEITLANGEIRKRPLIETNGETGEIVWDKGRDFATVRKVLSMPQVNIVKKTEVQTGGFSKESILPKRNSDKLIARKKDWDPKKYGGFDSPTVAYSVLVVAKVEKGKSKKLKSVKELLGITIMERSSFEKNPIDFLEAKGYKEVKKDLIIKLPKYSLFELENGRKRMLASAGELQKGNELALPSKYVNFLYLASHYEKLKGSPEDNEQKQLFVEQHKHYLDEIIEQISEFSKRVILADANLDKVLSAYNKHRDKPIREQAENIIHLFTLTNLGAPAAFKYFDTTIDRKRYTSTKEVLDATLIHQSITGLYETRIDLSQLGGDSGGSSGGSSGSETPGTSESATPESSGGSSGGSSRWEHRFELKPGRWVFVPTEEAREQGKEIKKQVEKRWKPPAYYYHLRQGGHVAALRCHLDNPWFAHVDLEDFFGQINRSRVTRALKGFFSYEEAWEMACESTVNRPPDSEFMLPYGFVQSPILASLALDKSALGRYLRQLNKNDGLTVSVYMDDIVISGDDEEMLEQAFDELKQAAEKSGFPLNEEKTQGPASQITAFNIELSHNSMEITEERMAEFQEAYRQGNEHQKEGILGYVGSVNPAQSGGSKRTADGSEFEPKKKRKV

SEQ ID NO: 1460 - protein, 1682 aa, synthetic construct
MKRTADGSEFESPKKKRKVDKKYSIGLDIGTNSVGWAVITDEYKVPSKKFKVLGNTDRHSIKKNLIGALLFDSGETAEATRLKRTARRRYTRRKNRICYLQEIFSNEMAKVDDSFFHRLEESFLVEEDKKHERHPIFGNIVDEVAYHEKYPTIYHLRKKLVDSTDKADLRLIYLALAHMIKFRGHFLIEGDLNPDNSDVDKLFIQLVQTYNQLFEENPINASGVDAKAILSARLSKSRRLENLIAQLPGEKKNGLFGNLIALSLGLTPNFKSNFDLAEDAKLQLSKDTYDDDLDNLLAQIGDQYADLFLAAKNLSDAILLSDILRVNTEITKAPLSASMIKRYDEHHQDLTLLKALVRQQLPEKYKEIFFDQSKNGYAGYIDGGASQEEFYKFIKPILEKMDGTEELLVKLNREDLLRKQRTFDNGSIPHQIHLGELHAILRRQEDFYPFLKDNREKIEKILTFRIPYYVGPLARGNSRFAWMTRKSEETITPWNFEEVVDKGASAQSFIERMTNFDKNLPNEKVLPKHSLLYEYFTVYNELTKVKYVTEGMRKPAFLSGEQKKAIVDLLFKTNRKVTVKQLKEDYFKKIECFDSVEISGVEDRFNASLGTYHDLLKIIKDKDFLDNEENEDILEDIVLTLTLFEDREMIEERLKTYAHLFDDKVMKQLKRRRYTGWGRLSRKLINGIRDKQSGKTILDFLKSDGFANRNFMQLIHDDSLTFKEDIQKAQVSGQGDSLHEHIANLAGSPAIKKGILQTVKVVDELVKVMGRHKPENIVIEMARENQTTQKGQKNSRERMKRIEEGIKELGSQILKEHPVENTQLQNEKLYLYYLQNGRDMYVDQELDINRLSDYDVDAIVPQSFLKDDSIDNKVLTRSDKNRGKSDNVPSEEVVKKMKNYWRQLLNAKLITQRKFDNLTKAERGGLSELDKAGFIKRQLVETRQITKHVAQILDSRMNTKYDENDKLIREVKVITLKSKLVSDFRKDFQFYKVREINNYHHAHDAYLNAVVGTALIKKYPKLESEFVYGDYKVYDVRKMIAKSEQEIGKATAKYFFYSNIMNFFKTEITLANGEIRKRPLIETNGETGEIVWDKGRDFATVRKVLSMPQVNIVKKTEVQTGGFSKESILPKRNSDKLIARKKDWDPKKYGGFDSPTVAYSVLVVAKVEKGKSKKLKSVKELLGITIMERSSFEKNPIDFLEAKGYKEVKKDLIIKLPKYSLFELENGRKRMLASAGELQKGNELALPSKYVNFLYLASHYEKLKGSPEDNEQKQLFVEQHKHYLDEIIEQISEFSKRVILADANLDKVLSAYNKHRDKPIREQAENIIHLFTLTNLGAPAAFKYFDTTIDRKRYTSTKEVLDATLIHQSITGLYETRIDLSQLGGDSGGSSGGSSGSETPGTSESATPESSGGSSGGSSRWEHRFELKPGRWVFVPTEEAREQGKEIKKQVEKRWKPPAYYYHLRQGGHVAALRCHLDNPWFAHVDLEDFFGQINRSRVTRALKGFFSYEEAWEMACESTVRMPPDSEFMLPYGFVQSPILASLALDKSALGRYLRQLNKNDGLTVSVYMDDIVISGDDEEMLEQAFDELKQAAEKSGFPLNEEKTQGPASQITAFNIELSHNSMEITEERMAEFQEAYRQGNEHQKEGILGYVGSVNPAQSGGSKRTADGSEFEPKKKRKV

SEQ ID NO: 1461 - protein, 1682 aa, synthetic construct
MKRTADGSEFESPKKKRKVDKKYSIGLDIGTNSVGWAVITDEYKVPSKKFKVLGNTDRHSIKKNLIGALLFDSGETAEATRLKRTARRRYTRRKNRICYLQEIFSNEMAKVDDSFFHRLEESFLVEEDKKHERHPIFGNIVDEVAYHEKYPTIYHLRKKLVDSTDKADLRLIYLALAHMIKFRGHFLIEGDLNPDNSDVDKLFIQLVQTYNQLFEENPINASGVDAKAILSARLSKSRRLENLIAQLPGEKKNGLFGNLIALSLGLTPNFKSNFDLAEDAKLQLSKDTYDDDLDNLLAQIGDQYADLFLAAKNLSDAILLSDILRVNTEITKAPLSASMIKRYDEHHQDLTLLKALVRQQLPEKYKEIFFDQSKNGYAGYIDGGASQEEFYKFIKPILEKMDGTEELLVKLNREDLLRKQRTFDNGSIPHQIHLGELHAILRRQEDFYPFLKDNREKIEKILTFRIPYYVGPLARGNSRFAWMTRKSEETITPWNFEEVVDKGASAQSFIERMTNFDKNLPNEKVLPKHSLLYEYFTVYNELTKVKYVTEGMRKPAFLSGEQKKAIVDLLFKTNRKVTVKQLKEDYFKKIECFDSVEISGVEDRFNASLGTYHDLLKIIKDKDFLDNEENEDILEDIVLTLTLFEDREMIEERLKTYAHLFDDKVMKQLKRRRYTGWGRLSRKLINGIRDKQSGKTILDFLKSDGFANRNFMQLIHDDSLTFKEDIQKAQVSGQGDSLHEHIANLAGSPAIKKGILQTVKVVDELVKVMGRHKPENIVIEMARENQTTQKGQKNSRERMKRIEEGIKELGSQILKEHPVENTQLQNEKLYLYYLQNGRDMYVDQELDINRLSDYDVDAIVPQSFLKDDSIDNKVLTRSDKNRGKSDNVPSEEVVKKMKNYWRQLLNAKLITQRKFDNLTKAERGGLSELDKAGFIKRQLVETRQITKHVAQILDSRMNTKYDENDKLIREVKVITLKSKLVSDFRKDFQFYKVREINNYHHAHDAYLNAVVGTALIKKYPKLESEFVYGDYKVYDVRKMIAKSEQEIGKATAKYFFYSNIMNFFKTEITLANGEIRKRPLIETNGETGEIVWDKGRDFATVRKVLSMPQVNIVKKTEVQTGGFSKESILPKRNSDKLIARKKDWDPKKYGGFDSPTVAYSVLVVAKVEKGKSKKLKSVKELLGITIMERSSFEKNPIDFLEAKGYKEVKKDLIIKLPKYSLFELENGRKRMLASAGELQKGNELALPSKYVNFLYLASHYEKLKGSPEDNEQKQLFVEQHKHYLDEIIEQISEFSKRVILADANLDKVLSAYNKHRDKPIREQAENIIHLFTLTNLGAPAAFKYFDTTIDRKRYTSTKEVLDATLIHQSITGLYETRIDLSQLGGDSGGSSGGSSGSETPGTSESATPESSGGSSGGSSRWEHRFELTPGRWVFVPTEEAREQGKEIKKQVEKRWKPPAYYYHLRQGGHVAALRCHLDNPWFAHVDLEDFFGQINRSRVTRALKGFFSYEEAWEMACESTVRRPPDSEFMLPYGFVQSPILASLALDKSALGRYLRQLNKNDGLTVSVYMDDIVISGDDEEMLEQAFDELKQAAEKSGFPLNEEKTQGPASQITAFNIELSHNSMEITEERMAEFQEAYRQGNEHQKEGILGYVGSVNPAQSGGSKRTADGSEFEPKKKRKV

SEQ ID NO: 1462 - protein, 1682 aa, synthetic construct
MKRTADGSEFESPKKKRKVDKKYSIGLDIGTNSVGWAVITDEYKVPSKKFKVLGNTDRHSIKKNLIGALLFDSGETAEATRLKRTARRRYTRRKNRICYLQEIFSNEMAKVDDSFFHRLEESFLVEEDKKHERHPIFGNIVDEVAYHEKYPTIYHLRKKLVDSTDKADLRLIYLALAHMIKFRGHFLIEGDLNPDNSDVDKLFIQLVQTYNQLFEENPINASGVDAKAILSARLSKSRRLENLIAQLPGEKKNGLFGNLIALSLGLTPNFKSNFDLAEDAKLQLSKDTYDDDLDNLLAQIGDQYADLFLAAKNLSDAILLSDILRVNTEITKAPLSASMIKRYDEHHQDLTLLKALVRQQLPEKYKEIFFDQSKNGYAGYIDGGASQEEFYKFIKPILEKMDGTEELLVKLNREDLLRKQRTFDNGSIPHQIHLGELHAILRRQEDFYPFLKDNREKIEKILTFRIPYYVGPLARGNSRFAWMTRKSEETITPWNFEEVVDKGASAQSFIERMTNFDKNLPNEKVLPKHSLLYEYFTVYNELTKVKYVTEGMRKPAFLSGEQKKAIVDLLFKTNRKVTVKQLKEDYFKKIECFDSVEISGVEDRFNASLGTYHDLLKIIKDKDFLDNEENEDILEDIVLTLTLFEDREMIEERLKTYAHLFDDKVMKQLKRRRYTGWGRLSRKLINGIRDKQSGKTILDFLKSDGFANRNFMQLIHDDSLTFKEDIQKAQVSGQGDSLHEHIANLAGSPAIKKGILQTVKVVDELVKVMGRHKPENIVIEMARENQTTQKGQKNSRERMKRIEEGIKELGSQILKEHPVENTQLQNEKLYLYYLQNGRDMYVDQELDINRLSDYDVDAIVPQSFLKDDSIDNKVLTRSDKNRGKSDNVPSEEVVKKMKNYWRQLLNAKLITQRKFDNLTKAERGGLSELDKAGFIKRQLVETRQITKHVAQILDSRMNTKYDENDKLIREVKVITLKSKLVSDFRKDFQFYKVREINNYHHAHDAYLNAVVGTALIKKYPKLESEFVYGDYKVYDVRKMIAKSEQEIGKATAKYFFYSNIMNFFKTEITLANGEIRKRPLIETNGETGEIVWDKGRDFATVRKVLSMPQVNIVKKTEVQTGGFSKESILPKRNSDKLIARKKDWDPKKYGGFDSPTVAYSVLVVAKVEKGKSKKLKSVKELLGITIMERSSFEKNPIDFLEAKGYKEVKKDLIIKLPKYSLFELENGRKRMLASAGELQKGNELALPSKYVNFLYLASHYEKLKGSPEDNEQKQLFVEQHKHYLDEIIEQISEFSKRVILADANLDKVLSAYNKHRDKPIREQAENIIHLFTLTNLGAPAAFKYFDTTIDRKRYTSTKEVLDATLIHQSITGLYETRIDLSQLGGDSGGSSGGSSGSETPGTSESATPESSGGSSGGSSRWEHRFELKPGRWVFVPTEEAREQGKEIKKQVEKRWKPPAYYYHLRQGGHVAALRCHLDNPWFAHVDLEDFFGQINRSRVTRALKGFFSYEEAWEMACESTVRRPPDSEFMLPYGWVQSPILASLALDKSALGRYLRQLNKNDGLTVSVYMDDIVISGDDEEMLEQAFDELKQAAEKSGFPLNEEKTQGPASQITAFNIELSHNSMEITEERMAEFQEAYRQGNEHQKEGILGYVGSVNPAQSGGSKRTADGSEFEPKKKRKV

SEQ ID NO: 1463 - protein, 1682 aa, synthetic construct
MKRTADGSEFESPKKKRKVDKKYSIGLDIGTNSVGWAVITDEYKVPSKKFKVLGNTDRHSIKKNLIGALLFDSGETAEATRLKRTARRRYTRRKNRICYLQEIFSNEMAKVDDSFFHRLEESFLVEEDKKHERHPIFGNIVDEVAYHEKYPTIYHLRKKLVDSTDKADLRLIYLALAHMIKFRGHFLIEGDLNPDNSDVDKLFIQLVQTYNQLFEENPINASGVDAKAILSARLSKSRRLENLIAQLPGEKKNGLFGNLIALSLGLTPNFKSNFDLAEDAKLQLSKDTYDDDLDNLLAQIGDQYADLFLAAKNLSDAILLSDILRVNTEITKAPLSASMIKRYDEHHQDLTLLKALVRQQLPEKYKEIFFDQSKNGYAGYIDGGASQEEFYKFIKPILEKMDGTEELLVKLNREDLLRKQRTFDNGSIPHQIHLGELHAILRRQEDFYPFLKDNREKIEKILTFRIPYYVGPLARGNSRFAWMTRKSEETITPWNFEEVVDKGASAQSFIERMTNFDKNLPNEKVLPKHSLLYEYFTVYNELTKVKYVTEGMRKPAFLSGEQKKAIVDLLFKTNRKVTVKQLKEDYFKKIECFDSVEISGVEDRFNASLGTYHDLLKIIKDKDFLDNEENEDILEDIVLTLTLFEDREMIEERLKTYAHLFDDKVMKQLKRRRYTGWGRLSRKLINGIRDKQSGKTILDFLKSDGFANRNFMQLIHDDSLTFKEDIQKAQVSGQGDSLHEHIANLAGSPAIKKGILQTVKVVDELVKVMGRHKPENIVIEMARENQTTQKGQKNSRERMKRIEEGIKELGSQILKEHPVENTQLQNEKLYLYYLQNGRDMYVDQELDINRLSDYDVDAIVPQSFLKDDSIDNKVLTRSDKNRGKSDNVPSEEVVKKMKNYWRQLLNAKLITQRKFDNLTKAERGGLSELDKAGFIKRQLVETRQITKHVAQILDSRMNTKYDENDKLIREVKVITLKSKLVSDFRKDFQFYKVREINNYHHAHDAYLNAVVGTALIKKYPKLESEFVYGDYKVYDVRKMIAKSEQEIGKATAKYFFYSNIMNFFKTEITLANGEIRKRPLIETNGETGEIVWDKGRDFATVRKVLSMPQVNIVKKTEVQTGGFSKESILPKRNSDKLIARKKDWDPKKYGGFDSPTVAYSVLVVAKVEKGKSKKLKSVKELLGITIMERSSFEKNPIDFLEAKGYKEVKKDLIIKLPKYSLFELENGRKRMLASAGELQKGNELALPSKYVNFLYLASHYEKLKGSPEDNEQKQLFVEQHKHYLDEIIEQISEFSKRVILADANLDKVLSAYNKHRDKPIREQAENIIHLFTLTNLGAPAAFKYFDTTIDRKRYTSTKEVLDATLIHQSITGLYETRIDLSQLGGDSGGSSGGSSGSETPGTSESATPESSGGSSGGSSRWEHRFELKPGRWVFVPTEEAREQGKEIKKQVEKRWKPPAYYYHLRQGGHVAALRCHLDNPWFAHVDLEDFFGQINRSRVTRALKGFFSYEEAWEMACESTVRRPPDSEFMLPYGFPQSPILASLALDKSALGRYLRQLNKNDGLTVSVYMDDIVISGDDEEMLEQAFDELKQAAEKSGFPLNEEKTQGPASQITAFNIELSHNSMEITEERMAEFQEAYRQGNEHQKEGILGYVGSVNPAQSGGSKRTADGSEFEPKKKRKV

SEQ ID NO: 1464 - protein, 1682 aa, synthetic construct
MKRTADGSEFESPKKKRKVDKKYSIGLDIGTNSVGWAVITDEYKVPSKKFKVLGNTDRHSIKKNLIGALLFDSGETAEATRLKRTARRRYTRRKNRICYLQEIFSNEMAKVDDSFFHRLEESFLVEEDKKHERHPIFGNIVDEVAYHEKYPTIYHLRKKLVDSTDKADLRLIYLALAHMIKFRGHFLIEGDLNPDNSDVDKLFIQLVQTYNQLFEENPINASGVDAKAILSARLSKSRRLENLIAQLPGEKKNGLFGNLIALSLGLTPNFKSNFDLAEDAKLQLSKDTYDDDLDNLLAQIGDQYADLFLAAKNLSDAILLSDILRVNTEITKAPLSASMIKRYDEHHQDLTLLKALVRQQLPEKYKEIFFDQSKNGYAGYIDGGASQEEFYKFIKPILEKMDGTEELLVKLNREDLLRKQRTFDNGSIPHQIHLGELHAILRRQEDFYPFLKDNREKIEKILTFRIPYYVGPLARGNSRFAWMTRKSEETITPWNFEEVVDKGASAQSFIERMTNFDKNLPNEKVLPKHSLLYEYFTVYNELTKVKYVTEGMRKPAFLSGEQKKAIVDLLFKTNRKVTVKQLKEDYFKKIECFDSVEISGVEDRFNASLGTYHDLLKIIKDKDFLDNEENEDILEDIVLTLTLFEDREMIEERLKTYAHLFDDKVMKQLKRRRYTGWGRLSRKLINGIRDKQSGKTILDFLKSDGFANRNFMQLIHDDSLTFKEDIQKAQVSGQGDSLHEHIANLAGSPAIKKGILQTVKVVDELVKVMGRHKPENIVIEMARENQTTQKGQKNSRERMKRIEEGIKELGSQILKEHPVENTQLQNEKLYLYYLQNGRDMYVDQELDINRLSDYDVDAIVPQSFLKDDSIDNKVLTRSDKNRGKSDNVPSEEVVKKMKNYWRQLLNAKLITQRKFDNLTKAERGGLSELDKAGFIKRQLVETRQITKHVAQILDSRMNTKYDENDKLIREVKVITLKSKLVSDFRKDFQFYKVREINNYHHAHDAYLNAVVGTALIKKYPKLESEFVYGDYKVYDVRKMIAKSEQEIGKATAKYFFYSNIMNFFKTEITLANGEIRKRPLIETNGETGEIVWDKGRDFATVRKVLSMPQVNIVKKTEVQTGGFSKESILPKRNSDKLIARKKDWDPKKYGGFDSPTVAYSVLVVAKVEKGKSKKLKSVKELLGITIMERSSFEKNPIDFLEAKGYKEVKKDLIIKLPKYSLFELENGRKRMLASAGELQKGNELALPSKYVNFLYLASHYEKLKGSPEDNEQKQLFVEQHKHYLDEIIEQISEFSKRVILADANLDKVLSAYNKHRDKPIREQAENIIHLFTLTNLGAPAAFKYFDTTIDRKRYTSTKEVLDATLIHQSITGLYETRIDLSQLGGDSGGSSGGSSGSETPGTSESATPESSGGSSGGSSRWEHRFELKPGRWVFVPTEEAREQGKEIKKQVEKRWKPPAYYYHLRQGGHVAALRCHLDNPWFAHVDLEDFFGQINRSRVTRALKGFFSYEEAWEMACESTVRRPPDSEFMLPYGFVQSPILAALALDKSALGRYLRQLNKNDGLTVSVYMDDIVISGDDEEMLEQAFDELKQAAEKSGFPLNEEKTQGPASQITAFNIELSHNSMEITEERMAEFQEAYRQGNEHQKEGILGYVGSVNPAQSGGSKRTADGSEFEPKKKRKV

SEQ ID NO: 1465 - protein, 1682 aa, synthetic construct
MKRTADGSEFESPKKKRKVDKKYSIGLDIGTNSVGWAVITDEYKVPSKKFKVLGNTDRHSIKKNLIGALLFDSGETAEATRLKRTARRRYTRRKNRICYLQEIFSNEMAKVDDSFFHRLEESFLVEEDKKHERHPIFGNIVDEVAYHEKYPTIYHLRKKLVDSTDKADLRLIYLALAHMIKFRGHFLIEGDLNPDNSDVDKLFIQLVQTYNQLFEENPINASGVDAKAILSARLSKSRRLENLIAQLPGEKKNGLFGNLIALSLGLTPNFKSNFDLAEDAKLQLSKDTYDDDLDNLLAQIGDQYADLFLAAKNLSDAILLSDILRVNTEITKAPLSASMIKRYDEHHQDLTLLKALVRQQLPEKYKEIFFDQSKNGYAGYIDGGASQEEFYKFIKPILEKMDGTEELLVKLNREDLLRKQRTFDNGSIPHQIHLGELHAILRRQEDFYPFLKDNREKIEKILTFRIPYYVGPLARGNSRFAWMTRKSEETITPWNFEEVVDKGASAQSFIERMTNFDKNLPNEKVLPKHSLLYEYFTVYNELTKVKYVTEGMRKPAFLSGEQKKAIVDLLFKTNRKVTVKQLKEDYFKKIECFDSVEISGVEDRFNASLGTYHDLLKIIKDKDFLDNEENEDILEDIVLTLTLFEDREMIEERLKTYAHLFDDKVMKQLKRRRYTGWGRLSRKLINGIRDKQSGKTILDFLKSDGFANRNFMQLIHDDSLTFKEDIQKAQVSGQGDSLHEHIANLAGSPAIKKGILQTVKVVDELVKVMGRHKPENIVIEMARENQTTQKGQKNSRERMKRIEEGIKELGSQILKEHPVENTQLQNEKLYLYYLQNGRDMYVDQELDINRLSDYDVDAIVPQSFLKDDSIDNKVLTRSDKNRGKSDNVPSEEVVKKMKNYWRQLLNAKLITQRKFDNLTKAERGGLSELDKAGFIKRQLVETRQITKHVAQILDSRMNTKYDENDKLIREVKVITLKSKLVSDFRKDFQFYKVREINNYHHAHDAYLNAVVGTALIKKYPKLESEFVYGDYKVYDVRKMIAKSEQEIGKATAKYFFYSNIMNFFKTEITLANGEIRKRPLIETNGETGEIVWDKGRDFATVRKVLSMPQVNIVKKTEVQTGGFSKESILPKRNSDKLIARKKDWDPKKYGGFDSPTVAYSVLVVAKVEKGKSKKLKSVKELLGITIMERSSFEKNPIDFLEAKGYKEVKKDLIIKLPKYSLFELENGRKRMLASAGELQKGNELALPSKYVNFLYLASHYEKLKGSPEDNEQKQLFVEQHKHYLDEIIEQISEFSKRVILADANLDKVLSAYNKHRDKPIREQAENIIHLFTLTNLGAPAAFKYFDTTIDRKRYTSTKEVLDATLIHQSITGLYETRIDLSQLGGDSGGSSGGSSGSETPGTSESATPESSGGSSGGSSRWEHRFELKPGRWVFVPTEEAREQGKEIKKQVEKRWKPPAYYYHLRQGGHVAALRCHLDNPWFAHVDLEDFFGQINRSRVTRALKGFFSYEEAWEMACESTVRRPPDSEFMLPYGFVQSPILASLALDKSPLGRYLRQLNKNDGLTVSVYMDDIVISGDDEEMLEQAFDELKQAAEKSGFPLNEEKTQGPASQITAFNIELSHNSMEITEERMAEFQEAYRQGNEHQKEGILGYVGSVNPAQSGGSKRTADGSEFEPKKKRKV

SEQ ID NO: 1466 - protein, 1682 aa, synthetic construct
MKRTADGSEFESPKKKRKVDKKYSIGLDIGTNSVGWAVITDEYKVPSKKFKVLGNTDRHSIKKNLIGALLFDSGETAEATRLKRTARRRYTRRKNRICYLQEIFSNEMAKVDDSFFHRLEESFLVEEDKKHERHPIFGNIVDEVAYHEKYPTIYHLRKKLVDSTDKADLRLIYLALAHMIKFRGHFLIEGDLNPDNSDVDKLFIQLVQTYNQLFEENPINASGVDAKAILSARLSKSRRLENLIAQLPGEKKNGLFGNLIALSLGLTPNFKSNFDLAEDAKLQLSKDTYDDDLDNLLAQIGDQYADLFLAAKNLSDAILLSDILRVNTEITKAPLSASMIKRYDEHHQDLTLLKALVRQQLPEKYKEIFFDQSKNGYAGYIDGGASQEEFYKFIKPILEKMDGTEELLVKLNREDLLRKQRTFDNGSIPHQIHLGELHAILRRQEDFYPFLKDNREKIEKILTFRIPYYVGPLARGNSRFAWMTRKSEETITPWNFEEVVDKGASAQSFIERMTNFDKNLPNEKVLPKHSLLYEYFTVYNELTKVKYVTEGMRKPAFLSGEQKKAIVDLLFKTNRKVTVKQLKEDYFKKIECFDSVEISGVEDRFNASLGTYHDLLKIIKDKDFLDNEENEDILEDIVLTLTLFEDREMIEERLKTYAHLFDDKVMKQLKRRRYTGWGRLSRKLINGIRDKQSGKTILDFLKSDGFANRNFMQLIHDDSLTFKEDIQKAQVSGQGDSLHEHIANLAGSPAIKKGILQTVKVVDELVKVMGRHKPENIVIEMARENQTTQKGQKNSRERMKRIEEGIKELGSQILKEHPVENTQLQNEKLYLYYLQNGRDMYVDQELDINRLSDYDVDAIVPQSFLKDDSIDNKVLTRSDKNRGKSDNVPSEEVVKKMKNYWRQLLNAKLITQRKFDNLTKAERGGLSELDKAGFIKRQLVETRQITKHVAQILDSRMNTKYDENDKLIREVKVITLKSKLVSDFRKDFQFYKVREINNYHHAHDAYLNAVVGTALIKKYPKLESEFVYGDYKVYDVRKMIAKSEQEIGKATAKYFFYSNIMNFFKTEITLANGEIRKRPLIETNGETGEIVWDKGRDFATVRKVLSMPQVNIVKKTEVQTGGFSKESILPKRNSDKLIARKKDWDPKKYGGFDSPTVAYSVLVVAKVEKGKSKKLKSVKELLGITIMERSSFEKNPIDFLEAKGYKEVKKDLIIKLPKYSLFELENGRKRMLASAGELQKGNELALPSKYVNFLYLASHYEKLKGSPEDNEQKQLFVEQHKHYLDEIIEQISEFSKRVILADANLDKVLSAYNKHRDKPIREQAENIIHLFTLTNLGAPAAFKYFDTTIDRKRYTSTKEVLDATLIHQSITGLYETRIDLSQLGGDSGGSSGGSSGSETPGTSESATPESSGGSSGGSSRWEHRFELKPGRWVFVPTEEAREQGKEIKKQVEKRWKPPAYYYHLRQGGHVAALRCHLDNPWFAHVDLEDFFGQINRSRVTRALKGFFSYEEAWEMACESTVRRPPDSEFMLPYGFVQSPILASLALDKSALGRSLRQLNKNDGLTVSVYMDDIVISGDDEEMLEQAFDELKQAAEKSGFPLNEEKTQGPASQITAFNIELSHNSMEITEERMAEFQEAYRQGNEHQKEGILGYVGSVNPAQSGGSKRTADGSEFEPKKKRKV

SEQ ID NO: 1467 - protein, 1682 aa, synthetic construct
MKRTADGSEFESPKKKRKVDKKYSIGLDIGTNSVGWAVITDEYKVPSKKFKVLGNTDRHSIKKNLIGALLFDSGETAEATRLKRTARRRYTRRKNRICYLQEIFSNEMAKVDDSFFHRLEESFLVEEDKKHERHPIFGNIVDEVAYHEKYPTIYHLRKKLVDSTDKADLRLIYLALAHMIKFRGHFLIEGDLNPDNSDVDKLFIQLVQTYNQLFEENPINASGVDAKAILSARLSKSRRLENLIAQLPGEKKNGLFGNLIALSLGLTPNFKSNFDLAEDAKLQLSKDTYDDDLDNLLAQIGDQYADLFLAAKNLSDAILLSDILRVNTEITKAPLSASMIKRYDEHHQDLTLLKALVRQQLPEKYKEIFFDQSKNGYAGYIDGGASQEEFYKFIKPILEKMDGTEELLVKLNREDLLRKQRTFDNGSIPHQIHLGELHAILRRQEDFYPFLKDNREKIEKILTFRIPYYVGPLARGNSRFAWMTRKSEETITPWNFEEVVDKGASAQSFIERMTNFDKNLPNEKVLPKHSLLYEYFTVYNELTKVKYVTEGMRKPAFLSGEQKKAIVDLLFKTNRKVTVKQLKEDYFKKIECFDSVEISGVEDRFNASLGTYHDLLKIIKDKDFLDNEENEDILEDIVLTLTLFEDREMIEERLKTYAHLFDDKVMKQLKRRRYTGWGRLSRKLINGIRDKQSGKTILDFLKSDGFANRNFMQLIHDDSLTFKEDIQKAQVSGQGDSLHEHIANLAGSPAIKKGILQTVKVVDELVKVMGRHKPENIVIEMARENQTTQKGQKNSRERMKRIEEGIKELGSQILKEHPVENTQLQNEKLYLYYLQNGRDMYVDQELDINRLSDYDVDAIVPQSFLKDDSIDNKVLTRSDKNRGKSDNVPSEEVVKKMKNYWRQLLNAKLITQRKFDNLTKAERGGLSELDKAGFIKRQLVETRQITKHVAQILDSRMNTKYDENDKLIREVKVITLKSKLVSDFRKDFQFYKVREINNYHHAHDAYLNAVVGTALIKKYPKLESEFVYGDYKVYDVRKMIAKSEQEIGKATAKYFFYSNIMNFFKTEITLANGEIRKRPLIETNGETGEIVWDKGRDFATVRKVLSMPQVNIVKKTEVQTGGFSKESILPKRNSDKLIARKKDWDPKKYGGFDSPTVAYSVLVVAKVEKGKSKKLKSVKELLGITIMERSSFEKNPIDFLEAKGYKEVKKDLIIKLPKYSLFELENGRKRMLASAGELQKGNELALPSKYVNFLYLASHYEKLKGSPEDNEQKQLFVEQHKHYLDEIIEQISEFSKRVILADANLDKVLSAYNKHRDKPIREQAENIIHLFTLTNLGAPAAFKYFDTTIDRKRYTSTKEVLDATLIHQSITGLYETRIDLSQLGGDSGGSSGGSSGSETPGTSESATPESSGGSSGGSSRWEHRFELKPGRWVFVPTEEAREQGKEIKKQVEKRWKPPAYYYHLRQGGHVAALRCHLDNPWFAHVDLEDFFGQINRSRVTRALKGFFSYEEAWEMACESTVRRPPDSEFMLPYGFVQSPILASLALDKSALGRKLRQLNKNDGLTVSVYMDDIVISGDDEEMLEQAFDELKQAAEKSGFPLNEEKTQGPASQITAFNIELSHNSMEITEERMAEFQEAYRQGNEHQKEGILGYVGSVNPAQSGGSKRTADGSEFEPKKKRKV

SEQ ID NO: 1468 - protein, 1682 aa, synthetic construct
MKRTADGSEFESPKKKRKVDKKYSIGLDIGTNSVGWAVITDEYKVPSKKFKVLGNTDRHSIKKNLIGALLFDSGETAEATRLKRTARRRYTRRKNRICYLQEIFSNEMAKVDDSFFHRLEESFLVEEDKKHERHPIFGNIVDEVAYHEKYPTIYHLRKKLVDSTDKADLRLIYLALAHMIKFRGHFLIEGDLNPDNSDVDKLFIQLVQTYNQLFEENPINASGVDAKAILSARLSKSRRLENLIAQLPGEKKNGLFGNLIALSLGLTPNFKSNFDLAEDAKLQLSKDTYDDDLDNLLAQIGDQYADLFLAAKNLSDAILLSDILRVNTEITKAPLSASMIKRYDEHHQDLTLLKALVRQQLPEKYKEIFFDQSKNGYAGYIDGGASQEEFYKFIKPILEKMDGTEELLVKLNREDLLRKQRTFDNGSIPHQIHLGELHAILRRQEDFYPFLKDNREKIEKILTFRIPYYVGPLARGNSRFAWMTRKSEETITPWNFEEVVDKGASAQSFIERMTNFDKNLPNEKVLPKHSLLYEYFTVYNELTKVKYVTEGMRKPAFLSGEQKKAIVDLLFKTNRKVTVKQLKEDYFKKIECFDSVEISGVEDRFNASLGTYHDLLKIIKDKDFLDNEENEDILEDIVLTLTLFEDREMIEERLKTYAHLFDDKVMKQLKRRRYTGWGRLSRKLINGIRDKQSGKTILDFLKSDGFANRNFMQLIHDDSLTFKEDIQKAQVSGQGDSLHEHIANLAGSPAIKKGILQTVKVVDELVKVMGRHKPENIVIEMARENQTTQKGQKNSRERMKRIEEGIKELGSQILKEHPVENTQLQNEKLYLYYLQNGRDMYVDQELDINRLSDYDVDAIVPQSFLKDDSIDNKVLTRSDKNRGKSDNVPSEEVVKKMKNYWRQLLNAKLITQRKFDNLTKAERGGLSELDKAGFIKRQLVETRQITKHVAQILDSRMNTKYDENDKLIREVKVITLKSKLVSDFRKDFQFYKVREINNYHHAHDAYLNAVVGTALIKKYPKLESEFVYGDYKVYDVRKMIAKSEQEIGKATAKYFFYSNIMNFFKTEITLANGEIRKRPLIETNGETGEIVWDKGRDFATVRKVLSMPQVNIVKKTEVQTGGFSKESILPKRNSDKLIARKKDWDPKKYGGFDSPTVAYSVLVVAKVEKGKSKKLKSVKELLGITIMERSSFEKNPIDFLEAKGYKEVKKDLIIKLPKYSLFELENGRKRMLASAGELQKGNELALPSKYVNFLYLASHYEKLKGSPEDNEQKQLFVEQHKHYLDEIIEQISEFSKRVILADANLDKVLSAYNKHRDKPIREQAENIIHLFTLTNLGAPAAFKYFDTTIDRKRYTSTKEVLDATLIHQSITGLYETRIDLSQLGGDSGGSSGGSSGSETPGTSESATPESSGGSSGGSSRWEHRFELKPGRWVFVPTEEAREQGKEIKKQVEKRWKPPAYYYHLRQGGHVAALRCHLDNPWFAHVDLEDFFGQINRSRVTRALKGFFSYEEAWEMACESTVRRPPDSEFMLPYGFVQSPILASLALDKSALGRYLRQLNKNDGLTVSMYMDDIVISGDDEEMLEQAFDELKQAAEKSGFPLNEEKTQGPASQITAFNIELSHNSMEITEERMAEFQEAYRQGNEHQKEGILGYVGSVNPAQSGGSKRTADGSEFEPKKKRKV

SEQ ID NO: 1469 - protein, 1682 aa, synthetic construct
MKRTADGSEFESPKKKRKVDKKYSIGLDIGTNSVGWAVITDEYKVPSKKFKVLGNTDRHSIKKNLIGALLFDSGETAEATRLKRTARRRYTRRKNRICYLQEIFSNEMAKVDDSFFHRLEESFLVEEDKKHERHPIFGNIVDEVAYHEKYPTIYHLRKKLVDSTDKADLRLIYLALAHMIKFRGHFLIEGDLNPDNSDVDKLFIQLVQTYNQLFEENPINASGVDAKAILSARLSKSRRLENLIAQLPGEKKNGLFGNLIALSLGLTPNFKSNFDLAEDAKLQLSKDTYDDDLDNLLAQIGDQYADLFLAAKNLSDAILLSDILRVNTEITKAPLSASMIKRYDEHHQDLTLLKALVRQQLPEKYKEIFFDQSKNGYAGYIDGGASQEEFYKFIKPILEKMDGTEELLVKLNREDLLRKQRTFDNGSIPHQIHLGELHAILRRQEDFYPFLKDNREKIEKILTFRIPYYVGPLARGNSRFAWMTRKSEETITPWNFEEVVDKGASAQSFIERMTNFDKNLPNEKVLPKHSLLYEYFTVYNELTKVKYVTEGMRKPAFLSGEQKKAIVDLLFKTNRKVTVKQLKEDYFKKIECFDSVEISGVEDRFNASLGTYHDLLKIIKDKDFLDNEENEDILEDIVLTLTLFEDREMIEERLKTYAHLFDDKVMKQLKRRRYTGWGRLSRKLINGIRDKQSGKTILDFLKSDGFANRNFMQLIHDDSLTFKEDIQKAQVSGQGDSLHEHIANLAGSPAIKKGILQTVKVVDELVKVMGRHKPENIVIEMARENQTTQKGQKNSRERMKRIEEGIKELGSQILKEHPVENTQLQNEKLYLYYLQNGRDMYVDQELDINRLSDYDVDAIVPQSFLKDDSIDNKVLTRSDKNRGKSDNVPSEEVVKKMKNYWRQLLNAKLITQRKFDNLTKAERGGLSELDKAGFIKRQLVETRQITKHVAQILDSRMNTKYDENDKLIREVKVITLKSKLVSDFRKDFQFYKVREINNYHHAHDAYLNAVVGTALIKKYPKLESEFVYGDYKVYDVRKMIAKSEQEIGKATAKYFFYSNIMNFFKTEITLANGEIRKRPLIETNGETGEIVWDKGRDFATVRKVLSMPQVNIVKKTEVQTGGFSKESILPKRNSDKLIARKKDWDPKKYGGFDSPTVAYSVLVVAKVEKGKSKKLKSVKELLGITIMERSSFEKNPIDFLEAKGYKEVKKDLIIKLPKYSLFELENGRKRMLASAGELQKGNELALPSKYVNFLYLASHYEKLKGSPEDNEQKQLFVEQHKHYLDEIIEQISEFSKRVILADANLDKVLSAYNKHRDKPIREQAENIIHLFTLTNLGAPAAFKYFDTTIDRKRYTSTKEVLDATLIHQSITGLYETRIDLSQLGGDSGGSSGGSSGSETPGTSESATPESSGGSSGGSSRWEHRFELKPGRWVFVPTEEAREQGKEIKKQVEKRWKPPAYYYHLRQGGHVAALRCHLDNPWFAHVDLEDFFGQINRSRVTRALKGFFSYEEAWEMACESTVRRPPDSEFMLPYGFVQSPILASLALDKSALGRYLRQLNKNDGLTVSVYMDDIVISGDDEEMLEQAFDELKQAAEKSGFTLNEEKTQGPASQITAFNIELSHNSMEITEERMAEFQEAYRQGNEHQKEGILGYVGSVNPAQSGGSKRTADGSEFEPKKKRKV

SEQ ID NO: 1470 - protein, 1682 aa, synthetic construct
MKRTADGSEFESPKKKRKVDKKYSIGLDIGTNSVGWAVITDEYKVPSKKFKVLGNTDRHSIKKNLIGALLFDSGETAEATRLKRTARRRYTRRKNRICYLQEIFSNEMAKVDDSFFHRLEESFLVEEDKKHERHPIFGNIVDEVAYHEKYPTIYHLRKKLVDSTDKADLRLIYLALAHMIKFRGHFLIEGDLNPDNSDVDKLFIQLVQTYNQLFEENPINASGVDAKAILSARLSKSRRLENLIAQLPGEKKNGLFGNLIALSLGLTPNFKSNFDLAEDAKLQLSKDTYDDDLDNLLAQIGDQYADLFLAAKNLSDAILLSDILRVNTEITKAPLSASMIKRYDEHHQDLTLLKALVRQQLPEKYKEIFFDQSKNGYAGYIDGGASQEEFYKFIKPILEKMDGTEELLVKLNREDLLRKQRTFDNGSIPHQIHLGELHAILRRQEDFYPFLKDNREKIEKILTFRIPYYVGPLARGNSRFAWMTRKSEETITPWNFEEVVDKGASAQSFIERMTNFDKNLPNEKVLPKHSLLYEYFTVYNELTKVKYVTEGMRKPAFLSGEQKKAIVDLLFKTNRKVTVKQLKEDYFKKIECFDSVEISGVEDRFNASLGTYHDLLKIIKDKDFLDNEENEDILEDIVLTLTLFEDREMIEERLKTYAHLFDDKVMKQLKRRRYTGWGRLSRKLINGIRDKQSGKTILDFLKSDGFANRNFMQLIHDDSLTFKEDIQKAQVSGQGDSLHEHIANLAGSPAIKKGILQTVKVVDELVKVMGRHKPENIVIEMARENQTTQKGQKNSRERMKRIEEGIKELGSQILKEHPVENTQLQNEKLYLYYLQNGRDMYVDQELDINRLSDYDVDAIVPQSFLKDDSIDNKVLTRSDKNRGKSDNVPSEEVVKKMKNYWRQLLNAKLITQRKFDNLTKAERGGLSELDKAGFIKRQLVETRQITKHVAQILDSRMNTKYDENDKLIREVKVITLKSKLVSDFRKDFQFYKVREINNYHHAHDAYLNAVVGTALIKKYPKLESEFVYGDYKVYDVRKMIAKSEQEIGKATAKYFFYSNIMNFFKTEITLANGEIRKRPLIETNGETGEIVWDKGRDFATVRKVLSMPQVNIVKKTEVQTGGFSKESILPKRNSDKLIARKKDWDPKKYGGFDSPTVAYSVLVVAKVEKGKSKKLKSVKELLGITIMERSSFEKNPIDFLEAKGYKEVKKDLIIKLPKYSLFELENGRKRMLASAGELQKGNELALPSKYVNFLYLASHYEKLKGSPEDNEQKQLFVEQHKHYLDEIIEQISEFSKRVILADANLDKVLSAYNKHRDKPIREQAENIIHLFTLTNLGAPAAFKYFDTTIDRKRYTSTKEVLDATLIHQSITGLYETRIDLSQLGGDSGGSSGGSSGSETPGTSESATPESSGGSSGGSSRWEHRFELKPGRWVFVPTEEAREQGKEIKKQVEKRWKPPAYYYHLRQGGHVAALRCHLDNPWFAHVDLEDFFGQINRSRVTRALKGFFSYEEAWEMACESTVRRPPDSEFMLPYGFVQSPILASLALDKSALGRYLRQLNKNDGLTVSVYMDDIVISGDDEEMLEQAFDELKQAAEKSGFYLNEEKTQGPASQITAFNIELSHNSMEITEERMAEFQEAYRQGNEHQKEGILGYVGSVNPAQSGGSKRTADGSEFEPKKKRKV

SEQ ID NO: 1471 - protein, 1682 aa, synthetic construct
MKRTADGSEFESPKKKRKVDKKYSIGLDIGTNSVGWAVITDEYKVPSKKFKVLGNTDRHSIKKNLIGALLFDSGETAEATRLKRTARRRYTRRKNRICYLQEIFSNEMAKVDDSFFHRLEESFLVEEDKKHERHPIFGNIVDEVAYHEKYPTIYHLRKKLVDSTDKADLRLIYLALAHMIKFRGHFLIEGDLNPDNSDVDKLFIQLVQTYNQLFEENPINASGVDAKAILSARLSKSRRLENLIAQLPGEKKNGLFGNLIALSLGLTPNFKSNFDLAEDAKLQLSKDTYDDDLDNLLAQIGDQYADLFLAAKNLSDAILLSDILRVNTEITKAPLSASMIKRYDEHHQDLTLLKALVRQQLPEKYKEIFFDQSKNGYAGYIDGGASQEEFYKFIKPILEKMDGTEELLVKLNREDLLRKQRTFDNGSIPHQIHLGELHAILRRQEDFYPFLKDNREKIEKILTFRIPYYVGPLARGNSRFAWMTRKSEETITPWNFEEVVDKGASAQSFIERMTNFDKNLPNEKVLPKHSLLYEYFTVYNELTKVKYVTEGMRKPAFLSGEQKKAIVDLLFKTNRKVTVKQLKEDYFKKIECFDSVEISGVEDRFNASLGTYHDLLKIIKDKDFLDNEENEDILEDIVLTLTLFEDREMIEERLKTYAHLFDDKVMKQLKRRRYTGWGRLSRKLINGIRDKQSGKTILDFLKSDGFANRNFMQLIHDDSLTFKEDIQKAQVSGQGDSLHEHIANLAGSPAIKKGILQTVKVVDELVKVMGRHKPENIVIEMARENQTTQKGQKNSRERMKRIEEGIKELGSQILKEHPVENTQLQNEKLYLYYLQNGRDMYVDQELDINRLSDYDVDAIVPQSFLKDDSIDNKVLTRSDKNRGKSDNVPSEEVVKKMKNYWRQLLNAKLITQRKFDNLTKAERGGLSELDKAGFIKRQLVETRQITKHVAQILDSRMNTKYDENDKLIREVKVITLKSKLVSDFRKDFQFYKVREINNYHHAHDAYLNAVVGTALIKKYPKLESEFVYGDYKVYDVRKMIAKSEQEIGKATAKYFFYSNIMNFFKTEITLANGEIRKRPLIETNGETGEIVWDKGRDFATVRKVLSMPQVNIVKKTEVQTGGFSKESILPKRNSDKLIARKKDWDPKKYGGFDSPTVAYSVLVVAKVEKGKSKKLKSVKELLGITIMERSSFEKNPIDFLEAKGYKEVKKDLIIKLPKYSLFELENGRKRMLASAGELQKGNELALPSKYVNFLYLASHYEKLKGSPEDNEQKQLFVEQHKHYLDEIIEQISEFSKRVILADANLDKVLSAYNKHRDKPIREQAENIIHLFTLTNLGAPAAFKYFDTTIDRKRYTSTKEVLDATLIHQSITGLYETRIDLSQLGGDSGGSSGGSSGSETPGTSESATPESSGGSSGGSSRWEHRFELKPGRWVFVPTEEAREQGKEIKKQVEKRWKPPAYYYHLRQGGHVAALRCHLDNPWFAHVDLEDFFGQINRSRVTRALKGFFSYEEAWEMACESTVRRPPDSEFMLPYGFVQSPILASLALDKSALGRYLRQLNKNDGLTVSVYMDDIVISGDDEEMLEQAFDELKQAAEKSGFPLNEEHTQGPASQITAFNIELSHNSMEITEERMAEFQEAYRQGNEHQKEGILGYVGSVNPAQSGGSKRTADGSEFEPKKKRKV

SEQ ID NO: 1472 - protein, 1682 aa, synthetic construct
MKRTADGSEFESPKKKRKVDKKYSIGLDIGTNSVGWAVITDEYKVPSKKFKVLGNTDRHSIKKNLIGALLFDSGETAEATRLKRTARRRYTRRKNRICYLQEIFSNEMAKVDDSFFHRLEESFLVEEDKKHERHPIFGNIVDEVAYHEKYPTIYHLRKKLVDSTDKADLRLIYLALAHMIKFRGHFLIEGDLNPDNSDVDKLFIQLVQTYNQLFEENPINASGVDAKAILSARLSKSRRLENLIAQLPGEKKNGLFGNLIALSLGLTPNFKSNFDLAEDAKLQLSKDTYDDDLDNLLAQIGDQYADLFLAAKNLSDAILLSDILRVNTEITKAPLSASMIKRYDEHHQDLTLLKALVRQQLPEKYKEIFFDQSKNGYAGYIDGGASQEEFYKFIKPILEKMDGTEELLVKLNREDLLRKQRTFDNGSIPHQIHLGELHAILRRQEDFYPFLKDNREKIEKILTFRIPYYVGPLARGNSRFAWMTRKSEETITPWNFEEVVDKGASAQSFIERMTNFDKNLPNEKVLPKHSLLYEYFTVYNELTKVKYVTEGMRKPAFLSGEQKKAIVDLLFKTNRKVTVKQLKEDYFKKIECFDSVEISGVEDRFNASLGTYHDLLKIIKDKDFLDNEENEDILEDIVLTLTLFEDREMIEERLKTYAHLFDDKVMKQLKRRRYTGWGRLSRKLINGIRDKQSGKTILDFLKSDGFANRNFMQLIHDDSLTFKEDIQKAQVSGQGDSLHEHIANLAGSPAIKKGILQTVKVVDELVKVMGRHKPENIVIEMARENQTTQKGQKNSRERMKRIEEGIKELGSQILKEHPVENTQLQNEKLYLYYLQNGRDMYVDQELDINRLSDYDVDAIVPQSFLKDDSIDNKVLTRSDKNRGKSDNVPSEEVVKKMKNYWRQLLNAKLITQRKFDNLTKAERGGLSELDKAGFIKRQLVETRQITKHVAQILDSRMNTKYDENDKLIREVKVITLKSKLVSDFRKDFQFYKVREINNYHHAHDAYLNAVVGTALIKKYPKLESEFVYGDYKVYDVRKMIAKSEQEIGKATAKYFFYSNIMNFFKTEITLANGEIRKRPLIETNGETGEIVWDKGRDFATVRKVLSMPQVNIVKKTEVQTGGFSKESILPKRNSDKLIARKKDWDPKKYGGFDSPTVAYSVLVVAKVEKGKSKKLKSVKELLGITIMERSSFEKNPIDFLEAKGYKEVKKDLIIKLPKYSLFELENGRKRMLASAGELQKGNELALPSKYVNFLYLASHYEKLKGSPEDNEQKQLFVEQHKHYLDEIIEQISEFSKRVILADANLDKVLSAYNKHRDKPIREQAENIIHLFTLTNLGAPAAFKYFDTTIDRKRYTSTKEVLDATLIHQSITGLYETRIDLSQLGGDSGGSSGGSSGSETPGTSESATPESSGGSSGGSSRWEHRFELKPGCWVFVPTEEAREQGKEIKKQVEKRWKPPAYYYHLRQGGHVAALRCHLDNPWFAHVDLEDFFGQINRSRVTRALKGFFSYEEAWEMACESTVRRPPDSEFMLPYGFVQSPILASLALDKSALGRYLRQLNKNDGLTVSVYMDDIVISGDDEEMLEQAFDELKQAAEKSGFPLNEEKTQGPASQITAFNIELSHNSMEITEERMAEFQEAYRQGNEHQKEGILGYVGSVNPAQSGGSKRTADGSEFEPKKKRKV

SEQ ID NO: 1473 - protein, 1682 aa, synthetic construct
MKRTADGSEFESPKKKRKVDKKYSIGLDIGTNSVGWAVITDEYKVPSKKFKVLGNTDRHSIKKNLIGALLFDSGETAEATRLKRTARRRYTRRKNRICYLQEIFSNEMAKVDDSFFHRLEESFLVEEDKKHERHPIFGNIVDEVAYHEKYPTIYHLRKKLVDSTDKADLRLIYLALAHMIKFRGHFLIEGDLNPDNSDVDKLFIQLVQTYNQLFEENPINASGVDAKAILSARLSKSRRLENLIAQLPGEKKNGLFGNLIALSLGLTPNFKSNFDLAEDAKLQLSKDTYDDDLDNLLAQIGDQYADLFLAAKNLSDAILLSDILRVNTEITKAPLSASMIKRYDEHHQDLTLLKALVRQQLPEKYKEIFFDQSKNGYAGYIDGGASQEEFYKFIKPILEKMDGTEELLVKLNREDLLRKQRTFDNGSIPHQIHLGELHAILRRQEDFYPFLKDNREKIEKILTFRIPYYVGPLARGNSRFAWMTRKSEETITPWNFEEVVDKGASAQSFIERMTNFDKNLPNEKVLPKHSLLYEYFTVYNELTKVKYVTEGMRKPAFLSGEQKKAIVDLLFKTNRKVTVKQLKEDYFKKIECFDSVEISGVEDRFNASLGTYHDLLKIIKDKDFLDNEENEDILEDIVLTLTLFEDREMIEERLKTYAHLFDDKVMKQLKRRRYTGWGRLSRKLINGIRDKQSGKTILDFLKSDGFANRNFMQLIHDDSLTFKEDIQKAQVSGQGDSLHEHIANLAGSPAIKKGILQTVKVVDELVKVMGRHKPENIVIEMARENQTTQKGQKNSRERMKRIEEGIKELGSQILKEHPVENTQLQNEKLYLYYLQNGRDMYVDQELDINRLSDYDVDAIVPQSFLKDDSIDNKVLTRSDKNRGKSDNVPSEEVVKKMKNYWRQLLNAKLITQRKFDNLTKAERGGLSELDKAGFIKRQLVETRQITKHVAQILDSRMNTKYDENDKLIREVKVITLKSKLVSDFRKDFQFYKVREINNYHHAHDAYLNAVVGTALIKKYPKLESEFVYGDYKVYDVRKMIAKSEQEIGKATAKYFFYSNIMNFFKTEITLANGEIRKRPLIETNGETGEIVWDKGRDFATVRKVLSMPQVNIVKKTEVQTGGFSKESILPKRNSDKLIARKKDWDPKKYGGFDSPTVAYSVLVVAKVEKGKSKKLKSVKELLGITIMERSSFEKNPIDFLEAKGYKEVKKDLIIKLPKYSLFELENGRKRMLASAGELQKGNELALPSKYVNFLYLASHYEKLKGSPEDNEQKQLFVEQHKHYLDEIIEQISEFSKRVILADANLDKVLSAYNKHRDKPIREQAENIIHLFTLTNLGAPAAFKYFDTTIDRKRYTSTKEVLDATLIHQSITGLYETRIDLSQLGGDSGGSSGGSSGSETPGTSESATPESSGGSSGGSSRWEHRFELKPGRWVFVPTEEAREQGKEIKKQVEKRWKPPAYYYHLRQGGHVAALRCHLDNPWFAHVDLEDFFGQINRSRVTRALKGFFSYEEAWEMACESTVRRPPDSEFMLPYGFVQSPILASLALDKSALGRYLRQLNKNDGLTVSVYMDDIVISGDDEEMLEQAFDELKQAAEKSGFPLNEEKTQGPASQLTAFNIELSHNSMEITEERMAEFQEAYRQGNEHQKEGILGYVGSVNPAQSGGSKRTADGSEFEPKKKRKV

SEQ ID NO: 1474 - protein, 1682 aa, synthetic construct
MKRTADGSEFESPKKKRKVDKKYSIGLDIGTNSVGWAVITDEYKVPSKKFKVLGNTDRHSIKKNLIGALLFDSGETAEATRLKRTARRRYTRRKNRICYLQEIFSNEMAKVDDSFFHRLEESFLVEEDKKHERHPIFGNIVDEVAYHEKYPTIYHLRKKLVDSTDKADLRLIYLALAHMIKFRGHFLIEGDLNPDNSDVDKLFIQLVQTYNQLFEENPINASGVDAKAILSARLSKSRRLENLIAQLPGEKKNGLFGNLIALSLGLTPNFKSNFDLAEDAKLQLSKDTYDDDLDNLLAQIGDQYADLFLAAKNLSDAILLSDILRVNTEITKAPLSASMIKRYDEHHQDLTLLKALVRQQLPEKYKEIFFDQSKNGYAGYIDGGASQEEFYKFIKPILEKMDGTEELLVKLNREDLLRKQRTFDNGSIPHQIHLGELHAILRRQEDFYPFLKDNREKIEKILTFRIPYYVGPLARGNSRFAWMTRKSEETITPWNFEEVVDKGASAQSFIERMTNFDKNLPNEKVLPKHSLLYEYFTVYNELTKVKYVTEGMRKPAFLSGEQKKAIVDLLFKTNRKVTVKQLKEDYFKKIECFDSVEISGVEDRFNASLGTYHDLLKIIKDKDFLDNEENEDILEDIVLTLTLFEDREMIEERLKTYAHLFDDKVMKQLKRRRYTGWGRLSRKLINGIRDKQSGKTILDFLKSDGFANRNFMQLIHDDSLTFKEDIQKAQVSGQGDSLHEHIANLAGSPAIKKGILQTVKVVDELVKVMGRHKPENIVIEMARENQTTQKGQKNSRERMKRIEEGIKELGSQILKEHPVENTQLQNEKLYLYYLQNGRDMYVDQELDINRLSDYDVDAIVPQSFLKDDSIDNKVLTRSDKNRGKSDNVPSEEVVKKMKNYWRQLLNAKLITQRKFDNLTKAERGGLSELDKAGFIKRQLVETRQITKHVAQILDSRMNTKYDENDKLIREVKVITLKSKLVSDFRKDFQFYKVREINNYHHAHDAYLNAVVGTALIKKYPKLESEFVYGDYKVYDVRKMIAKSEQEIGKATAKYFFYSNIMNFFKTEITLANGEIRKRPLIETNGETGEIVWDKGRDFATVRKVLSMPQVNIVKKTEVQTGGFSKESILPKRNSDKLIARKKDWDPKKYGGFDSPTVAYSVLVVAKVEKGKSKKLKSVKELLGITIMERSSFEKNPIDFLEAKGYKEVKKDLIIKLPKYSLFELENGRKRMLASAGELQKGNELALPSKYVNFLYLASHYEKLKGSPEDNEQKQLFVEQHKHYLDEIIEQISEFSKRVILADANLDKVLSAYNKHRDKPIREQAENIIHLFTLTNLGAPAAFKYFDTTIDRKRYTSTKEVLDATLIHQSITGLYETRIDLSQLGGDSGGSSGGSSGSETPGTSESATPESSGGSSGGSSRWEHRFELKPGRWVFVPTEEAREQGKEIKKQVEKRWKPPAYYYHLRQGGHVAALRCHLDNPWFAHVDLEDFFGQINRSRVTRALKGFFSYEEAWEMACESTVRRPPDSEFMLPYGFVQSPILASLALDKSALGRYLRQLNKNDGLTVSVYMDDIVISGDDEEMLEQAFDELKQAAEKSGFPLNEEKTIGPASQITVFSIELSHNSMEITEERMAEFQEAYRQGNEHQKEGILGYVGSVNPAQSGGSKRTADGSEFEPKKKRKV

SEQ ID NO: 1475 - protein, 1682 aa, synthetic construct
MKRTADGSEFESPKKKRKVDKKYSIGLDIGTNSVGWAVITDEYKVPSKKFKVLGNTDRHSIKKNLIGALLFDSGETAEATRLKRTARRRYTRRKNRICYLQEIFSNEMAKVDDSFFHRLEESFLVEEDKKHERHPIFGNIVDEVAYHEKYPTIYHLRKKLVDSTDKADLRLIYLALAHMIKFRGHFLIEGDLNPDNSDVDKLFIQLVQTYNQLFEENPINASGVDAKAILSARLSKSRRLENLIAQLPGEKKNGLFGNLIALSLGLTPNFKSNFDLAEDAKLQLSKDTYDDDLDNLLAQIGDQYADLFLAAKNLSDAILLSDILRVNTEITKAPLSASMIKRYDEHHQDLTLLKALVRQQLPEKYKEIFFDQSKNGYAGYIDGGASQEEFYKFIKPILEKMDGTEELLVKLNREDLLRKQRTFDNGSIPHQIHLGELHAILRRQEDFYPFLKDNREKIEKILTFRIPYYVGPLARGNSRFAWMTRKSEETITPWNFEEVVDKGASAQSFIERMTNFDKNLPNEKVLPKHSLLYEYFTVYNELTKVKYVTEGMRKPAFLSGEQKKAIVDLLFKTNRKVTVKQLKEDYFKKIECFDSVEISGVEDRFNASLGTYHDLLKIIKDKDFLDNEENEDILEDIVLTLTLFEDREMIEERLKTYAHLFDDKVMKQLKRRRYTGWGRLSRKLINGIRDKQSGKTILDFLKSDGFANRNFMQLIHDDSLTFKEDIQKAQVSGQGDSLHEHIANLAGSPAIKKGILQTVKVVDELVKVMGRHKPENIVIEMARENQTTQKGQKNSRERMKRIEEGIKELGSQILKEHPVENTQLQNEKLYLYYLQNGRDMYVDQELDINRLSDYDVDAIVPQSFLKDDSIDNKVLTRSDKNRGKSDNVPSEEVVKKMKNYWRQLLNAKLITQRKFDNLTKAERGGLSELDKAGFIKRQLVETRQITKHVAQILDSRMNTKYDENDKLIREVKVITLKSKLVSDFRKDFQFYKVREINNYHHAHDAYLNAVVGTALIKKYPKLESEFVYGDYKVYDVRKMIAKSEQEIGKATAKYFFYSNIMNFFKTEITLANGEIRKRPLIETNGETGEIVWDKGRDFATVRKVLSMPQVNIVKKTEVQTGGFSKESILPKRNSDKLIARKKDWDPKKYGGFDSPTVAYSVLVVAKVEKGKSKKLKSVKELLGITIMERSSFEKNPIDFLEAKGYKEVKKDLIIKLPKYSLFELENGRKRMLASAGELQKGNELALPSKYVNFLYLASHYEKLKGSPEDNEQKQLFVEQHKHYLDEIIEQISEFSKRVILADANLDKVLSAYNKHRDKPIREQAENIIHLFTLTNLGAPAAFKYFDTTIDRKRYTSTKEVLDATLIHQSITGLYETRIDLSQLGGDSGGSSGGSSGSETPGTSESATPESSGGSSGGSSRWEHRFELKPGRWVFVPTEEAREQGKEIKKQVEKRWKPPAYYYHLRQGGHVAALRCHLDNPWFAHVDLEDFFGQINRSRVTRALKGFFSYEEAWEMACESTVRRPPDSEFMLPYGFVQSPILASLALDKSALGRYLRQLNKNDGLTVSVYMDDIVISGDDEEMLEQAFDELKQAAEKSGFPLNEEKTQGPASQISLFNIELSHNSMEITEERMAEFQEAYRQGNEHQKEGILGYVGSVNPAQSGGSKRTADGSEFEPKKKRKV

SEQ ID NO: 1476 - protein, 1682 aa, synthetic construct
MKRTADGSEFESPKKKRKVDKKYSIGLDIGTNSVGWAVITDEYKVPSKKFKVLGNTDRHSIKKNLIGALLFDSGETAEATRLKRTARRRYTRRKNRICYLQEIFSNEMAKVDDSFFHRLEESFLVEEDKKHERHPIFGNIVDEVAYHEKYPTIYHLRKKLVDSTDKADLRLIYLALAHMIKFRGHFLIEGDLNPDNSDVDKLFIQLVQTYNQLFEENPINASGVDAKAILSARLSKSRRLENLIAQLPGEKKNGLFGNLIALSLGLTPNFKSNFDLAEDAKLQLSKDTYDDDLDNLLAQIGDQYADLFLAAKNLSDAILLSDILRVNTEITKAPLSASMIKRYDEHHQDLTLLKALVRQQLPEKYKEIFFDQSKNGYAGYIDGGASQEEFYKFIKPILEKMDGTEELLVKLNREDLLRKQRTFDNGSIPHQIHLGELHAILRRQEDFYPFLKDNREKIEKILTFRIPYYVGPLARGNSRFAWMTRKSEETITPWNFEEVVDKGASAQSFIERMTNFDKNLPNEKVLPKHSLLYEYFTVYNELTKVKYVTEGMRKPAFLSGEQKKAIVDLLFKTNRKVTVKQLKEDYFKKIECFDSVEISGVEDRFNASLGTYHDLLKIIKDKDFLDNEENEDILEDIVLTLTLFEDREMIEERLKTYAHLFDDKVMKQLKRRRYTGWGRLSRKLINGIRDKQSGKTILDFLKSDGFANRNFMQLIHDDSLTFKEDIQKAQVSGQGDSLHEHIANLAGSPAIKKGILQTVKVVDELVKVMGRHKPENIVIEMARENQTTQKGQKNSRERMKRIEEGIKELGSQILKEHPVENTQLQNEKLYLYYLQNGRDMYVDQELDINRLSDYDVDAIVPQSFLKDDSIDNKVLTRSDKNRGKSDNVPSEEVVKKMKNYWRQLLNAKLITQRKFDNLTKAERGGLSELDKAGFIKRQLVETRQITKHVAQILDSRMNTKYDENDKLIREVKVITLKSKLVSDFRKDFQFYKVREINNYHHAHDAYLNAVVGTALIKKYPKLESEFVYGDYKVYDVRKMIAKSEQEIGKATAKYFFYSNIMNFFKTEITLANGEIRKRPLIETNGETGEIVWDKGRDFATVRKVLSMPQVNIVKKTEVQTGGFSKESILPKRNSDKLIARKKDWDPKKYGGFDSPTVAYSVLVVAKVEKGKSKKLKSVKELLGITIMERSSFEKNPIDFLEAKGYKEVKKDLIIKLPKYSLFELENGRKRMLASAGELQKGNELALPSKYVNFLYLASHYEKLKGSPEDNEQKQLFVEQHKHYLDEIIEQISEFSKRVILADANLDKVLSAYNKHRDKPIREQAENIIHLFTLTNLGAPAAFKYFDTTIDRKRYTSTKEVLDATLIHQSITGLYETRIDLSQLGGDSGGSSGGSSGSETPGTSESATPESSGGSSGGSSRWEHRFELKPGRWVFVPTEEAREQGKEIKKQVEKRWKPPAYFYHLRQGGHVAALRCHLDNPWFAHVDLEDFFGQINRSRVTRALKGFFSYEEAWEMACESTVRRPPDSEFMLPYGFVQSPILAALAFDKSALGRYLRQLNKNDGLTVSVYMDDIVISGDDEEMLEQAFDELKQAAEKSGFPLNEEKTQGPASQITAFNIELSHNSMEITEERMAEFQEAYRQGNEHQKEGILGYVGSVNPAQSGGSKRTADGSEFEPKKKRKV

SEQ ID NO: 1477 - protein, 1682 aa, synthetic construct
MKRTADGSEFESPKKKRKVDKKYSIGLDIGTNSVGWAVITDEYKVPSKKFKVLGNTDRHSIKKNLIGALLFDSGETAEATRLKRTARRRYTRRKNRICYLQEIFSNEMAKVDDSFFHRLEESFLVEEDKKHERHPIFGNIVDEVAYHEKYPTIYHLRKKLVDSTDKADLRLIYLALAHMIKFRGHFLIEGDLNPDNSDVDKLFIQLVQTYNQLFEENPINASGVDAKAILSARLSKSRRLENLIAQLPGEKKNGLFGNLIALSLGLTPNFKSNFDLAEDAKLQLSKDTYDDDLDNLLAQIGDQYADLFLAAKNLSDAILLSDILRVNTEITKAPLSASMIKRYDEHHQDLTLLKALVRQQLPEKYKEIFFDQSKNGYAGYIDGGASQEEFYKFIKPILEKMDGTEELLVKLNREDLLRKQRTFDNGSIPHQIHLGELHAILRRQEDFYPFLKDNREKIEKILTFRIPYYVGPLARGNSRFAWMTRKSEETITPWNFEEVVDKGASAQSFIERMTNFDKNLPNEKVLPKHSLLYEYFTVYNELTKVKYVTEGMRKPAFLSGEQKKAIVDLLFKTNRKVTVKQLKEDYFKKIECFDSVEISGVEDRFNASLGTYHDLLKIIKDKDFLDNEENEDILEDIVLTLTLFEDREMIEERLKTYAHLFDDKVMKQLKRRRYTGWGRLSRKLINGIRDKQSGKTILDFLKSDGFANRNFMQLIHDDSLTFKEDIQKAQVSGQGDSLHEHIANLAGSPAIKKGILQTVKVVDELVKVMGRHKPENIVIEMARENQTTQKGQKNSRERMKRIEEGIKELGSQILKEHPVENTQLQNEKLYLYYLQNGRDMYVDQELDINRLSDYDVDAIVPQSFLKDDSIDNKVLTRSDKNRGKSDNVPSEEVVKKMKNYWRQLLNAKLITQRKFDNLTKAERGGLSELDKAGFIKRQLVETRQITKHVAQILDSRMNTKYDENDKLIREVKVITLKSKLVSDFRKDFQFYKVREINNYHHAHDAYLNAVVGTALIKKYPKLESEFVYGDYKVYDVRKMIAKSEQEIGKATAKYFFYSNIMNFFKTEITLANGEIRKRPLIETNGETGEIVWDKGRDFATVRKVLSMPQVNIVKKTEVQTGGFSKESILPKRNSDKLIARKKDWDPKKYGGFDSPTVAYSVLVVAKVEKGKSKKLKSVKELLGITIMERSSFEKNPIDFLEAKGYKEVKKDLIIKLPKYSLFELENGRKRMLASAGELQKGNELALPSKYVNFLYLASHYEKLKGSPEDNEQKQLFVEQHKHYLDEIIEQISEFSKRVILADANLDKVLSAYNKHRDKPIREQAENIIHLFTLTNLGAPAAFKYFDTTIDRKRYTSTKEVLDATLIHQSITGLYETRIDLSQLGGDSGGSSGGSSGSETPGTSESATPESSGGSSGGSSRWEHRFELKPGRWVFVPTEEAREQGKEIKKQVEKRWKPPAYCYHLRQGGHVAALRCHLDNPWFAHVDLEDFFGQINRSRVTRALKGFFSYEEAWEMACESTVRRPPDSEFMLPYGFVQSPILASLAFDKSALGRYLRQLNKNDGLTVSVYMDDIVISGDDEEMLEQAFDELKQAAEKSGFPLNEEKTQGPASQITAFNIELSHNSMEITEERMAEFQEAYRQGNEHQKEGILGYVGSVNPAQSGGSKRTADGSEFEPKKKRKV

SEQ ID NO: 1478 - protein, 1682 aa, synthetic construct
MKRTADGSEFESPKKKRKVDKKYSIGLDIGTNSVGWAVITDEYKVPSKKFKVLGNTDRHSIKKNLIGALLFDSGETAEATRLKRTARRRYTRRKNRICYLQEIFSNEMAKVDDSFFHRLEESFLVEEDKKHERHPIFGNIVDEVAYHEKYPTIYHLRKKLVDSTDKADLRLIYLALAHMIKFRGHFLIEGDLNPDNSDVDKLFIQLVQTYNQLFEENPINASGVDAKAILSARLSKSRRLENLIAQLPGEKKNGLFGNLIALSLGLTPNFKSNFDLAEDAKLQLSKDTYDDDLDNLLAQIGDQYADLFLAAKNLSDAILLSDILRVNTEITKAPLSASMIKRYDEHHQDLTLLKALVRQQLPEKYKEIFFDQSKNGYAGYIDGGASQEEFYKFIKPILEKMDGTEELLVKLNREDLLRKQRTFDNGSIPHQIHLGELHAILRRQEDFYPFLKDNREKIEKILTFRIPYYVGPLARGNSRFAWMTRKSEETITPWNFEEVVDKGASAQSFIERMTNFDKNLPNEKVLPKHSLLYEYFTVYNELTKVKYVTEGMRKPAFLSGEQKKAIVDLLFKTNRKVTVKQLKEDYFKKIECFDSVEISGVEDRFNASLGTYHDLLKIIKDKDFLDNEENEDILEDIVLTLTLFEDREMIEERLKTYAHLFDDKVMKQLKRRRYTGWGRLSRKLINGIRDKQSGKTILDFLKSDGFANRNFMQLIHDDSLTFKEDIQKAQVSGQGDSLHEHIANLAGSPAIKKGILQTVKVVDELVKVMGRHKPENIVIEMARENQTTQKGQKNSRERMKRIEEGIKELGSQILKEHPVENTQLQNEKLYLYYLQNGRDMYVDQELDINRLSDYDVDAIVPQSFLKDDSIDNKVLTRSDKNRGKSDNVPSEEVVKKMKNYWRQLLNAKLITQRKFDNLTKAERGGLSELDKAGFIKRQLVETRQITKHVAQILDSRMNTKYDENDKLIREVKVITLKSKLVSDFRKDFQFYKVREINNYHHAHDAYLNAVVGTALIKKYPKLESEFVYGDYKVYDVRKMIAKSEQEIGKATAKYFFYSNIMNFFKTEITLANGEIRKRPLIETNGETGEIVWDKGRDFATVRKVLSMPQVNIVKKTEVQTGGFSKESILPKRNSDKLIARKKDWDPKKYGGFDSPTVAYSVLVVAKVEKGKSKKLKSVKELLGITIMERSSFEKNPIDFLEAKGYKEVKKDLIIKLPKYSLFELENGRKRMLASAGELQKGNELALPSKYVNFLYLASHYEKLKGSPEDNEQKQLFVEQHKHYLDEIIEQISEFSKRVILADANLDKVLSAYNKHRDKPIREQAENIIHLFTLTNLGAPAAFKYFDTTIDRKRYTSTKEVLDATLIHQSITGLYETRIDLSQLGGDSGGSSGGSSGSETPGTSESATPESSGGSSGGSSRWEHRFELKPGRWVFVPTEEAREQGKEIKKQVEKRWKPPAYCYHLRQGGHVAALRCHLDNPWFAHVDLEDFFGQINRSRVTRALKGFFSYEEAWEMACESTVRRPPDSEFMLPYGFVQSPILATLAMDKSALGRYLRQLNKNDGLTVSVYMDDIVISGDDEEMLEQAFDELKQAAEKSGFPLNEEKTQGPASQITAFNIELSHNSMEITEERMAEFQEAYRQGNEHQKEGILGYVGSVNPAQSGGSKRTADGSEFEPKKKRKV

SEQ ID NO: 1479 - protein, 1682 aa, synthetic construct
MKRTADGSEFESPKKKRKVDKKYSIGLDIGTNSVGWAVITDEYKVPSKKFKVLGNTDRHSIKKNLIGALLFDSGETAEATRLKRTARRRYTRRKNRICYLQEIFSNEMAKVDDSFFHRLEESFLVEEDKKHERHPIFGNIVDEVAYHEKYPTIYHLRKKLVDSTDKADLRLIYLALAHMIKFRGHFLIEGDLNPDNSDVDKLFIQLVQTYNQLFEENPINASGVDAKAILSARLSKSRRLENLIAQLPGEKKNGLFGNLIALSLGLTPNFKSNFDLAEDAKLQLSKDTYDDDLDNLLAQIGDQYADLFLAAKNLSDAILLSDILRVNTEITKAPLSASMIKRYDEHHQDLTLLKALVRQQLPEKYKEIFFDQSKNGYAGYIDGGASQEEFYKFIKPILEKMDGTEELLVKLNREDLLRKQRTFDNGSIPHQIHLGELHAILRRQEDFYPFLKDNREKIEKILTFRIPYYVGPLARGNSRFAWMTRKSEETITPWNFEEVVDKGASAQSFIERMTNFDKNLPNEKVLPKHSLLYEYFTVYNELTKVKYVTEGMRKPAFLSGEQKKAIVDLLFKTNRKVTVKQLKEDYFKKIECFDSVEISGVEDRFNASLGTYHDLLKIIKDKDFLDNEENEDILEDIVLTLTLFEDREMIEERLKTYAHLFDDKVMKQLKRRRYTGWGRLSRKLINGIRDKQSGKTILDFLKSDGFANRNFMQLIHDDSLTFKEDIQKAQVSGQGDSLHEHIANLAGSPAIKKGILQTVKVVDELVKVMGRHKPENIVIEMARENQTTQKGQKNSRERMKRIEEGIKELGSQILKEHPVENTQLQNEKLYLYYLQNGRDMYVDQELDINRLSDYDVDAIVPQSFLKDDSIDNKVLTRSDKNRGKSDNVPSEEVVKKMKNYWRQLLNAKLITQRKFDNLTKAERGGLSELDKAGFIKRQLVETRQITKHVAQILDSRMNTKYDENDKLIREVKVITLKSKLVSDFRKDFQFYKVREINNYHHAHDAYLNAVVGTALIKKYPKLESEFVYGDYKVYDVRKMIAKSEQEIGKATAKYFFYSNIMNFFKTEITLANGEIRKRPLIETNGETGEIVWDKGRDFATVRKVLSMPQVNIVKKTEVQTGGFSKESILPKRNSDKLIARKKDWDPKKYGGFDSPTVAYSVLVVAKVEKGKSKKLKSVKELLGITIMERSSFEKNPIDFLEAKGYKEVKKDLIIKLPKYSLFELENGRKRMLASAGELQKGNELALPSKYVNFLYLASHYEKLKGSPEDNEQKQLFVEQHKHYLDEIIEQISEFSKRVILADANLDKVLSAYNKHRDKPIREQAENIIHLFTLTNLGAPAAFKYFDTTIDRKRYTSTKEVLDATLIHQSITGLYETRIDLSQLGGDSGGSSGGSSGSETPGTSESATPESSGGSSGGSSRWEHRFELKPGRWVFVPTEEAREQGKEIKKQVEKRWKPPAYFYHLRQGGHVAALRCHLDNPWFAHVDLEDFFGQINRSRVTRALKGFFSYEEAWEMACESTVRRPPDSEFMLPYGFVQSPILASLAFDKSALGRYLRQLNKNDGLTVSVYMDDIVISGDDEEMLEQAFDELKQAAEKSGFPLNEEKTQGPASQITAFNIELSHNSMEITEERMAEFQEAYRQGNEHQKEGILGYVGSVNPAQSGGSKRTADGSEFEPKKKRKV

SEQ ID NO: 1480 - protein, 1682 aa, synthetic construct
MKRTADGSEFESPKKKRKVDKKYSIGLDIGTNSVGWAVITDEYKVPSKKFKVLGNTDRHSIKKNLIGALLFDSGETAEATRLKRTARRRYTRRKNRICYLQEIFSNEMAKVDDSFFHRLEESFLVEEDKKHERHPIFGNIVDEVAYHEKYPTIYHLRKKLVDSTDKADLRLIYLALAHMIKFRGHFLIEGDLNPDNSDVDKLFIQLVQTYNQLFEENPINASGVDAKAILSARLSKSRRLENLIAQLPGEKKNGLFGNLIALSLGLTPNFKSNFDLAEDAKLQLSKDTYDDDLDNLLAQIGDQYADLFLAAKNLSDAILLSDILRVNTEITKAPLSASMIKRYDEHHQDLTLLKALVRQQLPEKYKEIFFDQSKNGYAGYIDGGASQEEFYKFIKPILEKMDGTEELLVKLNREDLLRKQRTFDNGSIPHQIHLGELHAILRRQEDFYPFLKDNREKIEKILTFRIPYYVGPLARGNSRFAWMTRKSEETITPWNFEEVVDKGASAQSFIERMTNFDKNLPNEKVLPKHSLLYEYFTVYNELTKVKYVTEGMRKPAFLSGEQKKAIVDLLFKTNRKVTVKQLKEDYFKKIECFDSVEISGVEDRFNASLGTYHDLLKIIKDKDFLDNEENEDILEDIVLTLTLFEDREMIEERLKTYAHLFDDKVMKQLKRRRYTGWGRLSRKLINGIRDKQSGKTILDFLKSDGFANRNFMQLIHDDSLTFKEDIQKAQVSGQGDSLHEHIANLAGSPAIKKGILQTVKVVDELVKVMGRHKPENIVIEMARENQTTQKGQKNSRERMKRIEEGIKELGSQILKEHPVENTQLQNEKLYLYYLQNGRDMYVDQELDINRLSDYDVDAIVPQSFLKDDSIDNKVLTRSDKNRGKSDNVPSEEVVKKMKNYWRQLLNAKLITQRKFDNLTKAERGGLSELDKAGFIKRQLVETRQITKHVAQILDSRMNTKYDENDKLIREVKVITLKSKLVSDFRKDFQFYKVREINNYHHAHDAYLNAVVGTALIKKYPKLESEFVYGDYKVYDVRKMIAKSEQEIGKATAKYFFYSNIMNFFKTEITLANGEIRKRPLIETNGETGEIVWDKGRDFATVRKVLSMPQVNIVKKTEVQTGGFSKESILPKRNSDKLIARKKDWDPKKYGGFDSPTVAYSVLVVAKVEKGKSKKLKSVKELLGITIMERSSFEKNPIDFLEAKGYKEVKKDLIIKLPKYSLFELENGRKRMLASAGELQKGNELALPSKYVNFLYLASHYEKLKGSPEDNEQKQLFVEQHKHYLDEIIEQISEFSKRVILADANLDKVLSAYNKHRDKPIREQAENIIHLFTLTNLGAPAAFKYFDTTIDRKRYTSTKEVLDATLIHQSITGLYETRIDLSQLGGDSGGSSGGSSGSETPGTSESATPESSGGSSGGSSRWEHRFELKPGRWVFVPTEEAREQGKEIKKQVEKRWKPPAYYYHLRQGGHVAALRCHLDNPWFAHVDLEDFFGQINRSRVTRALKGFFSYEEAWEMACESTVRRPPDSEFMLPYGFVQSPILATLAMDKSALGRYLRQLNKNDGLTVSVYMDDIVISGDDEEMLEQAFDELKQAAEKSGFPLNEEKTQGPASQITAFNIELSHNSMEITEERMAEFQEAYRQGNEHQKEGILGYVGSVNPAQSGGSKRTADGSEFEPKKKRKV

SEQ ID NO: 1481 - protein, 1682 aa, synthetic construct
MKRTADGSEFESPKKKRKVDKKYSIGLDIGTNSVGWAVITDEYKVPSKKFKVLGNTDRHSIKKNLIGALLFDSGETAEATRLKRTARRRYTRRKNRICYLQEIFSNEMAKVDDSFFHRLEESFLVEEDKKHERHPIFGNIVDEVAYHEKYPTIYHLRKKLVDSTDKADLRLIYLALAHMIKFRGHFLIEGDLNPDNSDVDKLFIQLVQTYNQLFEENPINASGVDAKAILSARLSKSRRLENLIAQLPGEKKNGLFGNLIALSLGLTPNFKSNFDLAEDAKLQLSKDTYDDDLDNLLAQIGDQYADLFLAAKNLSDAILLSDILRVNTEITKAPLSASMIKRYDEHHQDLTLLKALVRQQLPEKYKEIFFDQSKNGYAGYIDGGASQEEFYKFIKPILEKMDGTEELLVKLNREDLLRKQRTFDNGSIPHQIHLGELHAILRRQEDFYPFLKDNREKIEKILTFRIPYYVGPLARGNSRFAWMTRKSEETITPWNFEEVVDKGASAQSFIERMTNFDKNLPNEKVLPKHSLLYEYFTVYNELTKVKYVTEGMRKPAFLSGEQKKAIVDLLFKTNRKVTVKQLKEDYFKKIECFDSVEISGVEDRFNASLGTYHDLLKIIKDKDFLDNEENEDILEDIVLTLTLFEDREMIEERLKTYAHLFDDKVMKQLKRRRYTGWGRLSRKLINGIRDKQSGKTILDFLKSDGFANRNFMQLIHDDSLTFKEDIQKAQVSGQGDSLHEHIANLAGSPAIKKGILQTVKVVDELVKVMGRHKPENIVIEMARENQTTQKGQKNSRERMKRIEEGIKELGSQILKEHPVENTQLQNEKLYLYYLQNGRDMYVDQELDINRLSDYDVDAIVPQSFLKDDSIDNKVLTRSDKNRGKSDNVPSEEVVKKMKNYWRQLLNAKLITQRKFDNLTKAERGGLSELDKAGFIKRQLVETRQITKHVAQILDSRMNTKYDENDKLIREVKVITLKSKLVSDFRKDFQFYKVREINNYHHAHDAYLNAVVGTALIKKYPKLESEFVYGDYKVYDVRKMIAKSEQEIGKATAKYFFYSNIMNFFKTEITLANGEIRKRPLIETNGETGEIVWDKGRDFATVRKVLSMPQVNIVKKTEVQTGGFSKESILPKRNSDKLIARKKDWDPKKYGGFDSPTVAYSVLVVAKVEKGKSKKLKSVKELLGITIMERSSFEKNPIDFLEAKGYKEVKKDLIIKLPKYSLFELENGRKRMLASAGELQKGNELALPSKYVNFLYLASHYEKLKGSPEDNEQKQLFVEQHKHYLDEIIEQISEFSKRVILADANLDKVLSAYNKHRDKPIREQAENIIHLFTLTNLGAPAAFKYFDTTIDRKRYTSTKEVLDATLIHQSITGLYETRIDLSQLGGDSGGSSGGSSGSETPGTSESATPESSGGSSGGSSRWEHRFELKPGRWVFVPTEEAREQGKEIKKQVEKRWKPPAYYYRLRQGGHVAALRCHLDNPWFAHVDLEDFFGQINRSRVTRALKGFFSYEEAWEMACESTVRRPPDSEFMLPYGFVQSPILASLAFDKSALGRYLRQLNKNDGLTVSVYMDDIVISGDDEEMLEQAFDELKQAAEKSGFPLNEEKTQGPASQITAFNIELSHNSMEITEERMAEFQEAYRQGNEHQKEGILGYVGSVNPAQSGGSKRTADGSEFEPKKKRKV

SEQ ID NO: 1482 - protein, 1682 aa, synthetic construct
MKRTADGSEFESPKKKRKVDKKYSIGLDIGTNSVGWAVITDEYKVPSKKFKVLGNTDRHSIKKNLIGALLFDSGETAEATRLKRTARRRYTRRKNRICYLQEIFSNEMAKVDDSFFHRLEESFLVEEDKKHERHPIFGNIVDEVAYHEKYPTIYHLRKKLVDSTDKADLRLIYLALAHMIKFRGHFLIEGDLNPDNSDVDKLFIQLVQTYNQLFEENPINASGVDAKAILSARLSKSRRLENLIAQLPGEKKNGLFGNLIALSLGLTPNFKSNFDLAEDAKLQLSKDTYDDDLDNLLAQIGDQYADLFLAAKNLSDAILLSDILRVNTEITKAPLSASMIKRYDEHHQDLTLLKALVRQQLPEKYKEIFFDQSKNGYAGYIDGGASQEEFYKFIKPILEKMDGTEELLVKLNREDLLRKQRTFDNGSIPHQIHLGELHAILRRQEDFYPFLKDNREKIEKILTFRIPYYVGPLARGNSRFAWMTRKSEETITPWNFEEVVDKGASAQSFIERMTNFDKNLPNEKVLPKHSLLYEYFTVYNELTKVKYVTEGMRKPAFLSGEQKKAIVDLLFKTNRKVTVKQLKEDYFKKIECFDSVEISGVEDRFNASLGTYHDLLKIIKDKDFLDNEENEDILEDIVLTLTLFEDREMIEERLKTYAHLFDDKVMKQLKRRRYTGWGRLSRKLINGIRDKQSGKTILDFLKSDGFANRNFMQLIHDDSLTFKEDIQKAQVSGQGDSLHEHIANLAGSPAIKKGILQTVKVVDELVKVMGRHKPENIVIEMARENQTTQKGQKNSRERMKRIEEGIKELGSQILKEHPVENTQLQNEKLYLYYLQNGRDMYVDQELDINRLSDYDVDAIVPQSFLKDDSIDNKVLTRSDKNRGKSDNVPSEEVVKKMKNYWRQLLNAKLITQRKFDNLTKAERGGLSELDKAGFIKRQLVETRQITKHVAQILDSRMNTKYDENDKLIREVKVITLKSKLVSDFRKDFQFYKVREINNYHHAHDAYLNAVVGTALIKKYPKLESEFVYGDYKVYDVRKMIAKSEQEIGKATAKYFFYSNIMNFFKTEITLANGEIRKRPLIETNGETGEIVWDKGRDFATVRKVLSMPQVNIVKKTEVQTGGFSKESILPKRNSDKLIARKKDWDPKKYGGFDSPTVAYSVLVVAKVEKGKSKKLKSVKELLGITIMERSSFEKNPIDFLEAKGYKEVKKDLIIKLPKYSLFELENGRKRMLASAGELQKGNELALPSKYVNFLYLASHYEKLKGSPEDNEQKQLFVEQHKHYLDEIIEQISEFSKRVILADANLDKVLSAYNKHRDKPIREQAENIIHLFTLTNLGAPAAFKYFDTTIDRKRYTSTKEVLDATLIHQSITGLYETRIDLSQLGGDSGGSSGGSSGSETPGTSESATPESSGGSSGGSSRWEHRFELKPGRWVFVPTEEAREQGKEIKKQVEKRWKPPAYFYHLRQGGHVAALRCHLDNPWFAHVDLEDFFGQINRSRVTRALKGFFSYEEAWEMACESTVRRPPDSEFMLPYGFVQSPILATLAMDKSALGRYLRQLNKNDGLTVSVYMDDIVISGDDEEMLEQAFDELKQAAEKSGFPLNEEKTQGPASQITAFNIELSHNSMEITEERMAEFQEAYRQGNEHQKEGILGYVGSVNPAQSGGSKRTADGSEFEPKKKRKV

SEQ ID NO: 1483 - protein, 1682 aa, synthetic construct
MKRTADGSEFESPKKKRKVDKKYSIGLDIGTNSVGWAVITDEYKVPSKKFKVLGNTDRHSIKKNLIGALLFDSGETAEATRLKRTARRRYTRRKNRICYLQEIFSNEMAKVDDSFFHRLEESFLVEEDKKHERHPIFGNIVDEVAYHEKYPTIYHLRKKLVDSTDKADLRLIYLALAHMIKFRGHFLIEGDLNPDNSDVDKLFIQLVQTYNQLFEENPINASGVDAKAILSARLSKSRRLENLIAQLPGEKKNGLFGNLIALSLGLTPNFKSNFDLAEDAKLQLSKDTYDDDLDNLLAQIGDQYADLFLAAKNLSDAILLSDILRVNTEITKAPLSASMIKRYDEHHQDLTLLKALVRQQLPEKYKEIFFDQSKNGYAGYIDGGASQEEFYKFIKPILEKMDGTEELLVKLNREDLLRKQRTFDNGSIPHQIHLGELHAILRRQEDFYPFLKDNREKIEKILTFRIPYYVGPLARGNSRFAWMTRKSEETITPWNFEEVVDKGASAQSFIERMTNFDKNLPNEKVLPKHSLLYEYFTVYNELTKVKYVTEGMRKPAFLSGEQKKAIVDLLFKTNRKVTVKQLKEDYFKKIECFDSVEISGVEDRFNASLGTYHDLLKIIKDKDFLDNEENEDILEDIVLTLTLFEDREMIEERLKTYAHLFDDKVMKQLKRRRYTGWGRLSRKLINGIRDKQSGKTILDFLKSDGFANRNFMQLIHDDSLTFKEDIQKAQVSGQGDSLHEHIANLAGSPAIKKGILQTVKVVDELVKVMGRHKPENIVIEMARENQTTQKGQKNSRERMKRIEEGIKELGSQILKEHPVENTQLQNEKLYLYYLQNGRDMYVDQELDINRLSDYDVDAIVPQSFLKDDSIDNKVLTRSDKNRGKSDNVPSEEVVKKMKNYWRQLLNAKLITQRKFDNLTKAERGGLSELDKAGFIKRQLVETRQITKHVAQILDSRMNTKYDENDKLIREVKVITLKSKLVSDFRKDFQFYKVREINNYHHAHDAYLNAVVGTALIKKYPKLESEFVYGDYKVYDVRKMIAKSEQEIGKATAKYFFYSNIMNFFKTEITLANGEIRKRPLIETNGETGEIVWDKGRDFATVRKVLSMPQVNIVKKTEVQTGGFSKESILPKRNSDKLIARKKDWDPKKYGGFDSPTVAYSVLVVAKVEKGKSKKLKSVKELLGITIMERSSFEKNPIDFLEAKGYKEVKKDLIIKLPKYSLFELENGRKRMLASAGELQKGNELALPSKYVNFLYLASHYEKLKGSPEDNEQKQLFVEQHKHYLDEIIEQISEFSKRVILADANLDKVLSAYNKHRDKPIREQAENIIHLFTLTNLGAPAAFKYFDTTIDRKRYTSTKEVLDATLIHQSITGLYETRIDLSQLGGDSGGSSGGSSGSETPGTSESATPESSGGSSGGSSRWEHRFELKPGNWVFVPTEEAREQGKEIKKQVEKRWKPPAYYYHLRQGGHVAALRCHLDNPWFAHVDLEDFFGQINRSRVTRALKGFFSYEEAWEMACESTVRRPPDSEFMLPYGFVQSPILASLALDKSALGRYLRQLNKNDGLTVSVYMDDIVISGDDEEMLEQAFDELKQAAEKSGFPLNEEKTQGPASQITAFNIELSHNSMEITEERMAEFQEAYRQGNEHQKEGILGYVGSVNPAQSGGSKRTADGSEFEPKKKRKV

SEQ ID NO: 1484 - protein, 1682 aa, synthetic construct
MKRTADGSEFESPKKKRKVDKKYSIGLDIGTNSVGWAVITDEYKVPSKKFKVLGNTDRHSIKKNLIGALLFDSGETAEATRLKRTARRRYTRRKNRICYLQEIFSNEMAKVDDSFFHRLEESFLVEEDKKHERHPIFGNIVDEVAYHEKYPTIYHLRKKLVDSTDKADLRLIYLALAHMIKFRGHFLIEGDLNPDNSDVDKLFIQLVQTYNQLFEENPINASGVDAKAILSARLSKSRRLENLIAQLPGEKKNGLFGNLIALSLGLTPNFKSNFDLAEDAKLQLSKDTYDDDLDNLLAQIGDQYADLFLAAKNLSDAILLSDILRVNTEITKAPLSASMIKRYDEHHQDLTLLKALVRQQLPEKYKEIFFDQSKNGYAGYIDGGASQEEFYKFIKPILEKMDGTEELLVKLNREDLLRKQRTFDNGSIPHQIHLGELHAILRRQEDFYPFLKDNREKIEKILTFRIPYYVGPLARGNSRFAWMTRKSEETITPWNFEEVVDKGASAQSFIERMTNFDKNLPNEKVLPKHSLLYEYFTVYNELTKVKYVTEGMRKPAFLSGEQKKAIVDLLFKTNRKVTVKQLKEDYFKKIECFDSVEISGVEDRFNASLGTYHDLLKIIKDKDFLDNEENEDILEDIVLTLTLFEDREMIEERLKTYAHLFDDKVMKQLKRRRYTGWGRLSRKLINGIRDKQSGKTILDFLKSDGFANRNFMQLIHDDSLTFKEDIQKAQVSGQGDSLHEHIANLAGSPAIKKGILQTVKVVDELVKVMGRHKPENIVIEMARENQTTQKGQKNSRERMKRIEEGIKELGSQILKEHPVENTQLQNEKLYLYYLQNGRDMYVDQELDINRLSDYDVDAIVPQSFLKDDSIDNKVLTRSDKNRGKSDNVPSEEVVKKMKNYWRQLLNAKLITQRKFDNLTKAERGGLSELDKAGFIKRQLVETRQITKHVAQILDSRMNTKYDENDKLIREVKVITLKSKLVSDFRKDFQFYKVREINNYHHAHDAYLNAVVGTALIKKYPKLESEFVYGDYKVYDVRKMIAKSEQEIGKATAKYFFYSNIMNFFKTEITLANGEIRKRPLIETNGETGEIVWDKGRDFATVRKVLSMPQVNIVKKTEVQTGGFSKESILPKRNSDKLIARKKDWDPKKYGGFDSPTVAYSVLVVAKVEKGKSKKLKSVKELLGITIMERSSFEKNPIDFLEAKGYKEVKKDLIIKLPKYSLFELENGRKRMLASAGELQKGNELALPSKYVNFLYLASHYEKLKGSPEDNEQKQLFVEQHKHYLDEIIEQISEFSKRVILADANLDKVLSAYNKHRDKPIREQAENIIHLFTLTNLGAPAAFKYFDTTIDRKRYTSTKEVLDATLIHQSITGLYETRIDLSQLGGDSGGSSGGSSGSETPGTSESATPESSGGSSGGSSRWEHRFELKPGRWVFVPTEEAREQGKEIKKQVEKRWKPPAYYYHLRQGGHVAALRCHLDNPWFAHVDLEDFFGQINRSRVTRALKGFFSYEEAWEMACESTVRRPPDSEFMLPYGFVQSPILATLARDKSALGRYLRQLNKNDGLTVSVYMDDIVISGDDEEMLEQAFDELKQAAEKSGFPLNEEKTQGPASQITAFNIELSHNSMEITEERMAEFQEAYRQGNEHQKEGILGYVGSVNPAQSGGSKRTADGSEFEPKKKRKV

SEQ ID NO: 1485 - protein, 1682 aa, synthetic construct
MKRTADGSEFESPKKKRKVDKKYSIGLDIGTNSVGWAVITDEYKVPSKKFKVLGNTDRHSIKKNLIGALLFDSGETAEATRLKRTARRRYTRRKNRICYLQEIFSNEMAKVDDSFFHRLEESFLVEEDKKHERHPIFGNIVDEVAYHEKYPTIYHLRKKLVDSTDKADLRLIYLALAHMIKFRGHFLIEGDLNPDNSDVDKLFIQLVQTYNQLFEENPINASGVDAKAILSARLSKSRRLENLIAQLPGEKKNGLFGNLIALSLGLTPNFKSNFDLAEDAKLQLSKDTYDDDLDNLLAQIGDQYADLFLAAKNLSDAILLSDILRVNTEITKAPLSASMIKRYDEHHQDLTLLKALVRQQLPEKYKEIFFDQSKNGYAGYIDGGASQEEFYKFIKPILEKMDGTEELLVKLNREDLLRKQRTFDNGSIPHQIHLGELHAILRRQEDFYPFLKDNREKIEKILTFRIPYYVGPLARGNSRFAWMTRKSEETITPWNFEEVVDKGASAQSFIERMTNFDKNLPNEKVLPKHSLLYEYFTVYNELTKVKYVTEGMRKPAFLSGEQKKAIVDLLFKTNRKVTVKQLKEDYFKKIECFDSVEISGVEDRFNASLGTYHDLLKIIKDKDFLDNEENEDILEDIVLTLTLFEDREMIEERLKTYAHLFDDKVMKQLKRRRYTGWGRLSRKLINGIRDKQSGKTILDFLKSDGFANRNFMQLIHDDSLTFKEDIQKAQVSGQGDSLHEHIANLAGSPAIKKGILQTVKVVDELVKVMGRHKPENIVIEMARENQTTQKGQKNSRERMKRIEEGIKELGSQILKEHPVENTQLQNEKLYLYYLQNGRDMYVDQELDINRLSDYDVDAIVPQSFLKDDSIDNKVLTRSDKNRGKSDNVPSEEVVKKMKNYWRQLLNAKLITQRKFDNLTKAERGGLSELDKAGFIKRQLVETRQITKHVAQILDSRMNTKYDENDKLIREVKVITLKSKLVSDFRKDFQFYKVREINNYHHAHDAYLNAVVGTALIKKYPKLESEFVYGDYKVYDVRKMIAKSEQEIGKATAKYFFYSNIMNFFKTEITLANGEIRKRPLIETNGETGEIVWDKGRDFATVRKVLSMPQVNIVKKTEVQTGGFSKESILPKRNSDKLIARKKDWDPKKYGGFDSPTVAYSVLVVAKVEKGKSKKLKSVKELLGITIMERSSFEKNPIDFLEAKGYKEVKKDLIIKLPKYSLFELENGRKRMLASAGELQKGNELALPSKYVNFLYLASHYEKLKGSPEDNEQKQLFVEQHKHYLDEIIEQISEFSKRVILADANLDKVLSAYNKHRDKPIREQAENIIHLFTLTNLGAPAAFKYFDTTIDRKRYTSTKEVLDATLIHQSITGLYETRIDLSQLGGDSGGSSGGSSGSETPGTSESATPESSGGSSGGSSRWEHRFELKPGRWVFVPTEEAREQGKEIKKQVEKRWKPPAYYYRLRQGGHVAALRCHLDNPWFAHVDLEDFFGQINRSRVTRALKGFFSYEEAWEMACESTVRRPPDSEFMLPYGFVQSPILATLAMDKSALGRYLRQLNKNDGLTVSVYMDDIVISGDDEEMLEQAFDELKQAAEKSGFPLNEEKTQGPASQITAFNIELSHNSMEITEERMAEFQEAYRQGNEHQKEGILGYVGSVNPAQSGGSKRTADGSEFEPKKKRKV

SEQ ID NO: 1486 - protein, 1682 aa, synthetic construct
MKRTADGSEFESPKKKRKVDKKYSIGLDIGTNSVGWAVITDEYKVPSKKFKVLGNTDRHSIKKNLIGALLFDSGETAEATRLKRTARRRYTRRKNRICYLQEIFSNEMAKVDDSFFHRLEESFLVEEDKKHERHPIFGNIVDEVAYHEKYPTIYHLRKKLVDSTDKADLRLIYLALAHMIKFRGHFLIEGDLNPDNSDVDKLFIQLVQTYNQLFEENPINASGVDAKAILSARLSKSRRLENLIAQLPGEKKNGLFGNLIALSLGLTPNFKSNFDLAEDAKLQLSKDTYDDDLDNLLAQIGDQYADLFLAAKNLSDAILLSDILRVNTEITKAPLSASMIKRYDEHHQDLTLLKALVRQQLPEKYKEIFFDQSKNGYAGYIDGGASQEEFYKFIKPILEKMDGTEELLVKLNREDLLRKQRTFDNGSIPHQIHLGELHAILRRQEDFYPFLKDNREKIEKILTFRIPYYVGPLARGNSRFAWMTRKSEETITPWNFEEVVDKGASAQSFIERMTNFDKNLPNEKVLPKHSLLYEYFTVYNELTKVKYVTEGMRKPAFLSGEQKKAIVDLLFKTNRKVTVKQLKEDYFKKIECFDSVEISGVEDRFNASLGTYHDLLKIIKDKDFLDNEENEDILEDIVLTLTLFEDREMIEERLKTYAHLFDDKVMKQLKRRRYTGWGRLSRKLINGIRDKQSGKTILDFLKSDGFANRNFMQLIHDDSLTFKEDIQKAQVSGQGDSLHEHIANLAGSPAIKKGILQTVKVVDELVKVMGRHKPENIVIEMARENQTTQKGQKNSRERMKRIEEGIKELGSQILKEHPVENTQLQNEKLYLYYLQNGRDMYVDQELDINRLSDYDVDAIVPQSFLKDDSIDNKVLTRSDKNRGKSDNVPSEEVVKKMKNYWRQLLNAKLITQRKFDNLTKAERGGLSELDKAGFIKRQLVETRQITKHVAQILDSRMNTKYDENDKLIREVKVITLKSKLVSDFRKDFQFYKVREINNYHHAHDAYLNAVVGTALIKKYPKLESEFVYGDYKVYDVRKMIAKSEQEIGKATAKYFFYSNIMNFFKTEITLANGEIRKRPLIETNGETGEIVWDKGRDFATVRKVLSMPQVNIVKKTEVQTGGFSKESILPKRNSDKLIARKKDWDPKKYGGFDSPTVAYSVLVVAKVEKGKSKKLKSVKELLGITIMERSSFEKNPIDFLEAKGYKEVKKDLIIKLPKYSLFELENGRKRMLASAGELQKGNELALPSKYVNFLYLASHYEKLKGSPEDNEQKQLFVEQHKHYLDEIIEQISEFSKRVILADANLDKVLSAYNKHRDKPIREQAENIIHLFTLTNLGAPAAFKYFDTTIDRKRYTSTKEVLDATLIHQSITGLYETRIDLSQLGGDSGGSSGGSSGSETPGTSESATPESSGGSSGGSSRWEHRFELKPGRWVFVPTEEAREQGKEIKKQVEKRWKPPAYCYRLRQGGHVAALRCHLDNPWFAHVDLEDFFGQINRSRVTRALKGFFSYEEAWEMACESTVRRPPDSEFMLPYGFVQSPILASLAFDKSALGRYLRQLNKNDGLTVSVYMDDIVISGDDEEMLEQAFDELKQAAEKSGFPLNEEKTQGPASQITAFNIELSHNSMEITEERMAEFQEAYRQGNEHQKEGILGYVGSVNPAQSGGSKRTADGSEFEPKKKRKV

SEQ ID NO: 1487 - protein, 1682 aa, synthetic construct
MKRTADGSEFESPKKKRKVDKKYSIGLDIGTNSVGWAVITDEYKVPSKKFKVLGNTDRHSIKKNLIGALLFDSGETAEATRLKRTARRRYTRRKNRICYLQEIFSNEMAKVDDSFFHRLEESFLVEEDKKHERHPIFGNIVDEVAYHEKYPTIYHLRKKLVDSTDKADLRLIYLALAHMIKFRGHFLIEGDLNPDNSDVDKLFIQLVQTYNQLFEENPINASGVDAKAILSARLSKSRRLENLIAQLPGEKKNGLFGNLIALSLGLTPNFKSNFDLAEDAKLQLSKDTYDDDLDNLLAQIGDQYADLFLAAKNLSDAILLSDILRVNTEITKAPLSASMIKRYDEHHQDLTLLKALVRQQLPEKYKEIFFDQSKNGYAGYIDGGASQEEFYKFIKPILEKMDGTEELLVKLNREDLLRKQRTFDNGSIPHQIHLGELHAILRRQEDFYPFLKDNREKIEKILTFRIPYYVGPLARGNSRFAWMTRKSEETITPWNFEEVVDKGASAQSFIERMTNFDKNLPNEKVLPKHSLLYEYFTVYNELTKVKYVTEGMRKPAFLSGEQKKAIVDLLFKTNRKVTVKQLKEDYFKKIECFDSVEISGVEDRFNASLGTYHDLLKIIKDKDFLDNEENEDILEDIVLTLTLFEDREMIEERLKTYAHLFDDKVMKQLKRRRYTGWGRLSRKLINGIRDKQSGKTILDFLKSDGFANRNFMQLIHDDSLTFKEDIQKAQVSGQGDSLHEHIANLAGSPAIKKGILQTVKVVDELVKVMGRHKPENIVIEMARENQTTQKGQKNSRERMKRIEEGIKELGSQILKEHPVENTQLQNEKLYLYYLQNGRDMYVDQELDINRLSDYDVDAIVPQSFLKDDSIDNKVLTRSDKNRGKSDNVPSEEVVKKMKNYWRQLLNAKLITQRKFDNLTKAERGGLSELDKAGFIKRQLVETRQITKHVAQILDSRMNTKYDENDKLIREVKVITLKSKLVSDFRKDFQFYKVREINNYHHAHDAYLNAVVGTALIKKYPKLESEFVYGDYKVYDVRKMIAKSEQEIGKATAKYFFYSNIMNFFKTEITLANGEIRKRPLIETNGETGEIVWDKGRDFATVRKVLSMPQVNIVKKTEVQTGGFSKESILPKRNSDKLIARKKDWDPKKYGGFDSPTVAYSVLVVAKVEKGKSKKLKSVKELLGITIMERSSFEKNPIDFLEAKGYKEVKKDLIIKLPKYSLFELENGRKRMLASAGELQKGNELALPSKYVNFLYLASHYEKLKGSPEDNEQKQLFVEQHKHYLDEIIEQISEFSKRVILADANLDKVLSAYNKHRDKPIREQAENIIHLFTLTNLGAPAAFKYFDTTIDRKRYTSTKEVLDATLIHQSITGLYETRIDLSQLGGDSGGSSGGSSGSETPGTSESATPESSGGSSGGSSRWEHRFELKPGRWVFVPTEEAREQGKEIKKQVEKRWKPPAYFYHLRQGGHVAALRCHLDNPWFAHVDLEDFFGQINRSRVTRALKGFFSYEEAWEMACESTVRRPPDSEFMLPYGFVQSPILAILALDKSALGRYLRQLNKNDGLTVSVYMDDIVISGDDEEMLEQAFDELKQAAEKSGFPLNEEKTQGPASQITAFNIELSHNSMEITEERMAEFQEAYRQGNEHQKEGILGYVGSVNPAQSGGSKRTADGSEFEPKKKRKV

SEQ ID NO: 1488 - protein, 1682 aa, synthetic construct
MKRTADGSEFESPKKKRKVDKKYSIGLDIGTNSVGWAVITDEYKVPSKKFKVLGNTDRHSIKKNLIGALLFDSGETAEATRLKRTARRRYTRRKNRICYLQEIFSNEMAKVDDSFFHRLEESFLVEEDKKHERHPIFGNIVDEVAYHEKYPTIYHLRKKLVDSTDKADLRLIYLALAHMIKFRGHFLIEGDLNPDNSDVDKLFIQLVQTYNQLFEENPINASGVDAKAILSARLSKSRRLENLIAQLPGEKKNGLFGNLIALSLGLTPNFKSNFDLAEDAKLQLSKDTYDDDLDNLLAQIGDQYADLFLAAKNLSDAILLSDILRVNTEITKAPLSASMIKRYDEHHQDLTLLKALVRQQLPEKYKEIFFDQSKNGYAGYIDGGASQEEFYKFIKPILEKMDGTEELLVKLNREDLLRKQRTFDNGSIPHQIHLGELHAILRRQEDFYPFLKDNREKIEKILTFRIPYYVGPLARGNSRFAWMTRKSEETITPWNFEEVVDKGASAQSFIERMTNFDKNLPNEKVLPKHSLLYEYFTVYNELTKVKYVTEGMRKPAFLSGEQKKAIVDLLFKTNRKVTVKQLKEDYFKKIECFDSVEISGVEDRFNASLGTYHDLLKIIKDKDFLDNEENEDILEDIVLTLTLFEDREMIEERLKTYAHLFDDKVMKQLKRRRYTGWGRLSRKLINGIRDKQSGKTILDFLKSDGFANRNFMQLIHDDSLTFKEDIQKAQVSGQGDSLHEHIANLAGSPAIKKGILQTVKVVDELVKVMGRHKPENIVIEMARENQTTQKGQKNSRERMKRIEEGIKELGSQILKEHPVENTQLQNEKLYLYYLQNGRDMYVDQELDINRLSDYDVDAIVPQSFLKDDSIDNKVLTRSDKNRGKSDNVPSEEVVKKMKNYWRQLLNAKLITQRKFDNLTKAERGGLSELDKAGFIKRQLVETRQITKHVAQILDSRMNTKYDENDKLIREVKVITLKSKLVSDFRKDFQFYKVREINNYHHAHDAYLNAVVGTALIKKYPKLESEFVYGDYKVYDVRKMIAKSEQEIGKATAKYFFYSNIMNFFKTEITLANGEIRKRPLIETNGETGEIVWDKGRDFATVRKVLSMPQVNIVKKTEVQTGGFSKESILPKRNSDKLIARKKDWDPKKYGGFDSPTVAYSVLVVAKVEKGKSKKLKSVKELLGITIMERSSFEKNPIDFLEAKGYKEVKKDLIIKLPKYSLFELENGRKRMLASAGELQKGNELALPSKYVNFLYLASHYEKLKGSPEDNEQKQLFVEQHKHYLDEIIEQISEFSKRVILADANLDKVLSAYNKHRDKPIREQAENIIHLFTLTNLGAPAAFKYFDTTIDRKRYTSTKEVLDATLIHQSITGLYETRIDLSQLGGDSGGSSGGSSGSETPGTSESATPESSGGSSGGSSRWEHRFELKPGRWVFVPTEEAREQGKEIKKQVEKRWKPPAYYYHLRQGGHVAALRCHLDNPWFAHVDLEDFFGQINRSRVTRALKGFFSYEEAWEMACESTVRRPPDSEFMLPYGFVQSPILATLAFDKSALGRYLRQLNKNDGLTVSVYMDDIVISGDDEEMLEQAFDELKQAAEKSGFPLNEEKTQGPASQITAFNIELSHNSMEITEERMAEFQEAYRQGNEHQKEGILGYVGSVNPAQSGGSKRTADGSEFEPKKKRKV

SEQ ID NO: 1489 - protein, 1682 aa, synthetic construct
MKRTADGSEFESPKKKRKVDKKYSIGLDIGTNSVGWAVITDEYKVPSKKFKVLGNTDRHSIKKNLIGALLFDSGETAEATRLKRTARRRYTRRKNRICYLQEIFSNEMAKVDDSFFHRLEESFLVEEDKKHERHPIFGNIVDEVAYHEKYPTIYHLRKKLVDSTDKADLRLIYLALAHMIKFRGHFLIEGDLNPDNSDVDKLFIQLVQTYNQLFEENPINASGVDAKAILSARLSKSRRLENLIAQLPGEKKNGLFGNLIALSLGLTPNFKSNFDLAEDAKLQLSKDTYDDDLDNLLAQIGDQYADLFLAAKNLSDAILLSDILRVNTEITKAPLSASMIKRYDEHHQDLTLLKALVRQQLPEKYKEIFFDQSKNGYAGYIDGGASQEEFYKFIKPILEKMDGTEELLVKLNREDLLRKQRTFDNGSIPHQIHLGELHAILRRQEDFYPFLKDNREKIEKILTFRIPYYVGPLARGNSRFAWMTRKSEETITPWNFEEVVDKGASAQSFIERMTNFDKNLPNEKVLPKHSLLYEYFTVYNELTKVKYVTEGMRKPAFLSGEQKKAIVDLLFKTNRKVTVKQLKEDYFKKIECFDSVEISGVEDRFNASLGTYHDLLKIIKDKDFLDNEENEDILEDIVLTLTLFEDREMIEERLKTYAHLFDDKVMKQLKRRRYTGWGRLSRKLINGIRDKQSGKTILDFLKSDGFANRNFMQLIHDDSLTFKEDIQKAQVSGQGDSLHEHIANLAGSPAIKKGILQTVKVVDELVKVMGRHKPENIVIEMARENQTTQKGQKNSRERMKRIEEGIKELGSQILKEHPVENTQLQNEKLYLYYLQNGRDMYVDQELDINRLSDYDVDAIVPQSFLKDDSIDNKVLTRSDKNRGKSDNVPSEEVVKKMKNYWRQLLNAKLITQRKFDNLTKAERGGLSELDKAGFIKRQLVETRQITKHVAQILDSRMNTKYDENDKLIREVKVITLKSKLVSDFRKDFQFYKVREINNYHHAHDAYLNAVVGTALIKKYPKLESEFVYGDYKVYDVRKMIAKSEQEIGKATAKYFFYSNIMNFFKTEITLANGEIRKRPLIETNGETGEIVWDKGRDFATVRKVLSMPQVNIVKKTEVQTGGFSKESILPKRNSDKLIARKKDWDPKKYGGFDSPTVAYSVLVVAKVEKGKSKKLKSVKELLGITIMERSSFEKNPIDFLEAKGYKEVKKDLIIKLPKYSLFELENGRKRMLASAGELQKGNELALPSKYVNFLYLASHYEKLKGSPEDNEQKQLFVEQHKHYLDEIIEQISEFSKRVILADANLDKVLSAYNKHRDKPIREQAENIIHLFTLTNLGAPAAFKYFDTTIDRKRYTSTKEVLDATLIHQSITGLYETRIDLSQLGGDSGGSSGGSSGSETPGTSESATPESSGGSSGGSSRWEHRFELKPGRWVFVPTEEAREQGKEIKKQVEKRWKPPAYFYHLRQGGHVAALRCHLDNPWFAHVDLEDFFGQINRSRVTRALKGFFSYEEAWEMACESTVRRPPDSEFMLPYGFVQSPILAALAFDKSALGRYLRQLNKNDGLTVSVYMDDIVISGDDEEMLEQAFDELKQAAEKSGFPLNEEKTDGPASQISAFNIELSHNVMEITEERMAEFQEAYRQGNEHQKEGILGYVGSVNPAQSGGSKRTADGSEFEPKKKRKV

SEQ ID NO: 1490 - protein, 1682 aa, synthetic construct
MKRTADGSEFESPKKKRKVDKKYSIGLDIGTNSVGWAVITDEYKVPSKKFKVLGNTDRHSIKKNLIGALLFDSGETAEATRLKRTARRRYTRRKNRICYLQEIFSNEMAKVDDSFFHRLEESFLVEEDKKHERHPIFGNIVDEVAYHEKYPTIYHLRKKLVDSTDKADLRLIYLALAHMIKFRGHFLIEGDLNPDNSDVDKLFIQLVQTYNQLFEENPINASGVDAKAILSARLSKSRRLENLIAQLPGEKKNGLFGNLIALSLGLTPNFKSNFDLAEDAKLQLSKDTYDDDLDNLLAQIGDQYADLFLAAKNLSDAILLSDILRVNTEITKAPLSASMIKRYDEHHQDLTLLKALVRQQLPEKYKEIFFDQSKNGYAGYIDGGASQEEFYKFIKPILEKMDGTEELLVKLNREDLLRKQRTFDNGSIPHQIHLGELHAILRRQEDFYPFLKDNREKIEKILTFRIPYYVGPLARGNSRFAWMTRKSEETITPWNFEEVVDKGASAQSFIERMTNFDKNLPNEKVLPKHSLLYEYFTVYNELTKVKYVTEGMRKPAFLSGEQKKAIVDLLFKTNRKVTVKQLKEDYFKKIECFDSVEISGVEDRFNASLGTYHDLLKIIKDKDFLDNEENEDILEDIVLTLTLFEDREMIEERLKTYAHLFDDKVMKQLKRRRYTGWGRLSRKLINGIRDKQSGKTILDFLKSDGFANRNFMQLIHDDSLTFKEDIQKAQVSGQGDSLHEHIANLAGSPAIKKGILQTVKVVDELVKVMGRHKPENIVIEMARENQTTQKGQKNSRERMKRIEEGIKELGSQILKEHPVENTQLQNEKLYLYYLQNGRDMYVDQELDINRLSDYDVDAIVPQSFLKDDSIDNKVLTRSDKNRGKSDNVPSEEVVKKMKNYWRQLLNAKLITQRKFDNLTKAERGGLSELDKAGFIKRQLVETRQITKHVAQILDSRMNTKYDENDKLIREVKVITLKSKLVSDFRKDFQFYKVREINNYHHAHDAYLNAVVGTALIKKYPKLESEFVYGDYKVYDVRKMIAKSEQEIGKATAKYFFYSNIMNFFKTEITLANGEIRKRPLIETNGETGEIVWDKGRDFATVRKVLSMPQVNIVKKTEVQTGGFSKESILPKRNSDKLIARKKDWDPKKYGGFDSPTVAYSVLVVAKVEKGKSKKLKSVKELLGITIMERSSFEKNPIDFLEAKGYKEVKKDLIIKLPKYSLFELENGRKRMLASAGELQKGNELALPSKYVNFLYLASHYEKLKGSPEDNEQKQLFVEQHKHYLDEIIEQISEFSKRVILADANLDKVLSAYNKHRDKPIREQAENIIHLFTLTNLGAPAAFKYFDTTIDRKRYTSTKEVLDATLIHQSITGLYETRIDLSQLGGDSGGSSGGSSGSETPGTSESATPESSGGSSGGSSRWEHRFELKPGRWVFVPTEEAREQGKEIKKQVEKRWKPPAYCYHLRQGGHVAALRCHLDNPWFAHVDLEDFFGQINRSRVTRALKGFFSYEEAWEMACESTVRRPPDSEFMLPYGFVQSPILATLAMDKSALGRYLRQLNKNDGLTVSVYMDDIVISGDDEEMLEQAFDELKQAAEKSGFPLNEEKTDGPASQISAFNIELSHNVMEITEERMAEFQEAYRQGNEHQKEGILGYVGSVNPAQSGGSKRTADGSEFEPKKKRKV

SEQ ID NO: 1491 - protein, 1682 aa, synthetic construct
MKRTADGSEFESPKKKRKVDKKYSIGLDIGTNSVGWAVITDEYKVPSKKFKVLGNTDRHSIKKNLIGALLFDSGETAEATRLKRTARRRYTRRKNRICYLQEIFSNEMAKVDDSFFHRLEESFLVEEDKKHERHPIFGNIVDEVAYHEKYPTIYHLRKKLVDSTDKADLRLIYLALAHMIKFRGHFLIEGDLNPDNSDVDKLFIQLVQTYNQLFEENPINASGVDAKAILSARLSKSRRLENLIAQLPGEKKNGLFGNLIALSLGLTPNFKSNFDLAEDAKLQLSKDTYDDDLDNLLAQIGDQYADLFLAAKNLSDAILLSDILRVNTEITKAPLSASMIKRYDEHHQDLTLLKALVRQQLPEKYKEIFFDQSKNGYAGYIDGGASQEEFYKFIKPILEKMDGTEELLVKLNREDLLRKQRTFDNGSIPHQIHLGELHAILRRQEDFYPFLKDNREKIEKILTFRIPYYVGPLARGNSRFAWMTRKSEETITPWNFEEVVDKGASAQSFIERMTNFDKNLPNEKVLPKHSLLYEYFTVYNELTKVKYVTEGMRKPAFLSGEQKKAIVDLLFKTNRKVTVKQLKEDYFKKIECFDSVEISGVEDRFNASLGTYHDLLKIIKDKDFLDNEENEDILEDIVLTLTLFEDREMIEERLKTYAHLFDDKVMKQLKRRRYTGWGRLSRKLINGIRDKQSGKTILDFLKSDGFANRNFMQLIHDDSLTFKEDIQKAQVSGQGDSLHEHIANLAGSPAIKKGILQTVKVVDELVKVMGRHKPENIVIEMARENQTTQKGQKNSRERMKRIEEGIKELGSQILKEHPVENTQLQNEKLYLYYLQNGRDMYVDQELDINRLSDYDVDAIVPQSFLKDDSIDNKVLTRSDKNRGKSDNVPSEEVVKKMKNYWRQLLNAKLITQRKFDNLTKAERGGLSELDKAGFIKRQLVETRQITKHVAQILDSRMNTKYDENDKLIREVKVITLKSKLVSDFRKDFQFYKVREINNYHHAHDAYLNAVVGTALIKKYPKLESEFVYGDYKVYDVRKMIAKSEQEIGKATAKYFFYSNIMNFFKTEITLANGEIRKRPLIETNGETGEIVWDKGRDFATVRKVLSMPQVNIVKKTEVQTGGFSKESILPKRNSDKLIARKKDWDPKKYGGFDSPTVAYSVLVVAKVEKGKSKKLKSVKELLGITIMERSSFEKNPIDFLEAKGYKEVKKDLIIKLPKYSLFELENGRKRMLASAGELQKGNELALPSKYVNFLYLASHYEKLKGSPEDNEQKQLFVEQHKHYLDEIIEQISEFSKRVILADANLDKVLSAYNKHRDKPIREQAENIIHLFTLTNLGAPAAFKYFDTTIDRKRYTSTKEVLDATLIHQSITGLYETRIDLSQLGGDSGGSSGGSSGSETPGTSESATPESSGGSSGGSSRWEHRFELKPGRWVFVPTEEAREQGKEIKKQVEKRWKPPAYYYHLRQGGHVAALRCHLDNPWFAHVDLEDFFGQINRSRVTRALKGFFSYEEAWEMACESTVRRPPDSEFMLPYGFVQSPILATLAMDKSALGRYLRQLNKNDGLTVSVYMDDIVISGDDEEMLEQAFDELKQAAEKSGFPLNEEKTDGPASQISAFNIELSHNVMEITEERMAEFQEAYRQGNEHQKEGILGYVGSVNPAQSGGSKRTADGSEFEPKKKRKV

SEQ ID NO: 1492 - protein, 1682 aa, synthetic construct
MKRTADGSEFESPKKKRKVDKKYSIGLDIGTNSVGWAVITDEYKVPSKKFKVLGNTDRHSIKKNLIGALLFDSGETAEATRLKRTARRRYTRRKNRICYLQEIFSNEMAKVDDSFFHRLEESFLVEEDKKHERHPIFGNIVDEVAYHEKYPTIYHLRKKLVDSTDKADLRLIYLALAHMIKFRGHFLIEGDLNPDNSDVDKLFIQLVQTYNQLFEENPINASGVDAKAILSARLSKSRRLENLIAQLPGEKKNGLFGNLIALSLGLTPNFKSNFDLAEDAKLQLSKDTYDDDLDNLLAQIGDQYADLFLAAKNLSDAILLSDILRVNTEITKAPLSASMIKRYDEHHQDLTLLKALVRQQLPEKYKEIFFDQSKNGYAGYIDGGASQEEFYKFIKPILEKMDGTEELLVKLNREDLLRKQRTFDNGSIPHQIHLGELHAILRRQEDFYPFLKDNREKIEKILTFRIPYYVGPLARGNSRFAWMTRKSEETITPWNFEEVVDKGASAQSFIERMTNFDKNLPNEKVLPKHSLLYEYFTVYNELTKVKYVTEGMRKPAFLSGEQKKAIVDLLFKTNRKVTVKQLKEDYFKKIECFDSVEISGVEDRFNASLGTYHDLLKIIKDKDFLDNEENEDILEDIVLTLTLFEDREMIEERLKTYAHLFDDKVMKQLKRRRYTGWGRLSRKLINGIRDKQSGKTILDFLKSDGFANRNFMQLIHDDSLTFKEDIQKAQVSGQGDSLHEHIANLAGSPAIKKGILQTVKVVDELVKVMGRHKPENIVIEMARENQTTQKGQKNSRERMKRIEEGIKELGSQILKEHPVENTQLQNEKLYLYYLQNGRDMYVDQELDINRLSDYDVDAIVPQSFLKDDSIDNKVLTRSDKNRGKSDNVPSEEVVKKMKNYWRQLLNAKLITQRKFDNLTKAERGGLSELDKAGFIKRQLVETRQITKHVAQILDSRMNTKYDENDKLIREVKVITLKSKLVSDFRKDFQFYKVREINNYHHAHDAYLNAVVGTALIKKYPKLESEFVYGDYKVYDVRKMIAKSEQEIGKATAKYFFYSNIMNFFKTEITLANGEIRKRPLIETNGETGEIVWDKGRDFATVRKVLSMPQVNIVKKTEVQTGGFSKESILPKRNSDKLIARKKDWDPKKYGGFDSPTVAYSVLVVAKVEKGKSKKLKSVKELLGITIMERSSFEKNPIDFLEAKGYKEVKKDLIIKLPKYSLFELENGRKRMLASAGELQKGNELALPSKYVNFLYLASHYEKLKGSPEDNEQKQLFVEQHKHYLDEIIEQISEFSKRVILADANLDKVLSAYNKHRDKPIREQAENIIHLFTLTNLGAPAAFKYFDTTIDRKRYTSTKEVLDATLIHQSITGLYETRIDLSQLGGDSGGSSGGSSGSETPGTSESATPESSGGSSGGSSRWEHRFELKPGRWVFVPTEEAREQGKEIKKQVEKRWKPPAYYYHLRQGGHVAALRCHLDNPWFAHVDLEDFFGQINRSRVTRALKGFFSYEEAWEMACESTVRRPPDSEFMLPYGFVQSPILASLAMDKSALGRYLRQLNKNDGLTVSVYMDDIVISGDDEEMLEQAFDELKQAAEKSGFPLNEEKTDGPASQISAFNIELSHNVMEITEERMAEFQEAYRQGNEHQKEGILGYVGSVNPAQSGGSKRTADGSEFEPKKKRKV

SEQ ID NO: 1493 - protein, 1682 aa, synthetic construct
MKRTADGSEFESPKKKRKVDKKYSIGLDIGTNSVGWAVITDEYKVPSKKFKVLGNTDRHSIKKNLIGALLFDSGETAEATRLKRTARRRYTRRKNRICYLQEIFSNEMAKVDDSFFHRLEESFLVEEDKKHERHPIFGNIVDEVAYHEKYPTIYHLRKKLVDSTDKADLRLIYLALAHMIKFRGHFLIEGDLNPDNSDVDKLFIQLVQTYNQLFEENPINASGVDAKAILSARLSKSRRLENLIAQLPGEKKNGLFGNLIALSLGLTPNFKSNFDLAEDAKLQLSKDTYDDDLDNLLAQIGDQYADLFLAAKNLSDAILLSDILRVNTEITKAPLSASMIKRYDEHHQDLTLLKALVRQQLPEKYKEIFFDQSKNGYAGYIDGGASQEEFYKFIKPILEKMDGTEELLVKLNREDLLRKQRTFDNGSIPHQIHLGELHAILRRQEDFYPFLKDNREKIEKILTFRIPYYVGPLARGNSRFAWMTRKSEETITPWNFEEVVDKGASAQSFIERMTNFDKNLPNEKVLPKHSLLYEYFTVYNELTKVKYVTEGMRKPAFLSGEQKKAIVDLLFKTNRKVTVKQLKEDYFKKIECFDSVEISGVEDRFNASLGTYHDLLKIIKDKDFLDNEENEDILEDIVLTLTLFEDREMIEERLKTYAHLFDDKVMKQLKRRRYTGWGRLSRKLINGIRDKQSGKTILDFLKSDGFANRNFMQLIHDDSLTFKEDIQKAQVSGQGDSLHEHIANLAGSPAIKKGILQTVKVVDELVKVMGRHKPENIVIEMARENQTTQKGQKNSRERMKRIEEGIKELGSQILKEHPVENTQLQNEKLYLYYLQNGRDMYVDQELDINRLSDYDVDAIVPQSFLKDDSIDNKVLTRSDKNRGKSDNVPSEEVVKKMKNYWRQLLNAKLITQRKFDNLTKAERGGLSELDKAGFIKRQLVETRQITKHVAQILDSRMNTKYDENDKLIREVKVITLKSKLVSDFRKDFQFYKVREINNYHHAHDAYLNAVVGTALIKKYPKLESEFVYGDYKVYDVRKMIAKSEQEIGKATAKYFFYSNIMNFFKTEITLANGEIRKRPLIETNGETGEIVWDKGRDFATVRKVLSMPQVNIVKKTEVQTGGFSKESILPKRNSDKLIARKKDWDPKKYGGFDSPTVAYSVLVVAKVEKGKSKKLKSVKELLGITIMERSSFEKNPIDFLEAKGYKEVKKDLIIKLPKYSLFELENGRKRMLASAGELQKGNELALPSKYVNFLYLASHYEKLKGSPEDNEQKQLFVEQHKHYLDEIIEQISEFSKRVILADANLDKVLSAYNKHRDKPIREQAENIIHLFTLTNLGAPAAFKYFDTTIDRKRYTSTKEVLDATLIHQSITGLYETRIDLSQLGGDSGGSSGGSSGSETPGTSESATPESSGGSSGGSSRWEHRFELKPGRWVFVPTEEAREQGKEIKKQVEKRWKPPAYYYHLRQGGHVAALRCHLDNPWFAHVDLEDFFGQINRSRVTRALKGFFSYEEAWEMACESTVRRPPDSEFMLPYGFVQSPILASLAFDKSALGRYLRQLNKNDGLTVSVYMDDIVISGDDEEMLEQAFDELKQAAEKSGFPLNEEKTDGPASQISAFNIELSHNVMEITEERMAEFQEAYRQGNEHQKEGILGYVGSVNPAQSGGSKRTADGSEFEPKKKRKV

SEQ ID NO: 1494 - protein, 1682 aa, synthetic construct
MKRTADGSEFESPKKKRKVDKKYSIGLDIGTNSVGWAVITDEYKVPSKKFKVLGNTDRHSIKKNLIGALLFDSGETAEATRLKRTARRRYTRRKNRICYLQEIFSNEMAKVDDSFFHRLEESFLVEEDKKHERHPIFGNIVDEVAYHEKYPTIYHLRKKLVDSTDKADLRLIYLALAHMIKFRGHFLIEGDLNPDNSDVDKLFIQLVQTYNQLFEENPINASGVDAKAILSARLSKSRRLENLIAQLPGEKKNGLFGNLIALSLGLTPNFKSNFDLAEDAKLQLSKDTYDDDLDNLLAQIGDQYADLFLAAKNLSDAILLSDILRVNTEITKAPLSASMIKRYDEHHQDLTLLKALVRQQLPEKYKEIFFDQSKNGYAGYIDGGASQEEFYKFIKPILEKMDGTEELLVKLNREDLLRKQRTFDNGSIPHQIHLGELHAILRRQEDFYPFLKDNREKIEKILTFRIPYYVGPLARGNSRFAWMTRKSEETITPWNFEEVVDKGASAQSFIERMTNFDKNLPNEKVLPKHSLLYEYFTVYNELTKVKYVTEGMRKPAFLSGEQKKAIVDLLFKTNRKVTVKQLKEDYFKKIECFDSVEISGVEDRFNASLGTYHDLLKIIKDKDFLDNEENEDILEDIVLTLTLFEDREMIEERLKTYAHLFDDKVMKQLKRRRYTGWGRLSRKLINGIRDKQSGKTILDFLKSDGFANRNFMQLIHDDSLTFKEDIQKAQVSGQGDSLHEHIANLAGSPAIKKGILQTVKVVDELVKVMGRHKPENIVIEMARENQTTQKGQKNSRERMKRIEEGIKELGSQILKEHPVENTQLQNEKLYLYYLQNGRDMYVDQELDINRLSDYDVDAIVPQSFLKDDSIDNKVLTRSDKNRGKSDNVPSEEVVKKMKNYWRQLLNAKLITQRKFDNLTKAERGGLSELDKAGFIKRQLVETRQITKHVAQILDSRMNTKYDENDKLIREVKVITLKSKLVSDFRKDFQFYKVREINNYHHAHDAYLNAVVGTALIKKYPKLESEFVYGDYKVYDVRKMIAKSEQEIGKATAKYFFYSNIMNFFKTEITLANGEIRKRPLIETNGETGEIVWDKGRDFATVRKVLSMPQVNIVKKTEVQTGGFSKESILPKRNSDKLIARKKDWDPKKYGGFDSPTVAYSVLVVAKVEKGKSKKLKSVKELLGITIMERSSFEKNPIDFLEAKGYKEVKKDLIIKLPKYSLFELENGRKRMLASAGELQKGNELALPSKYVNFLYLASHYEKLKGSPEDNEQKQLFVEQHKHYLDEIIEQISEFSKRVILADANLDKVLSAYNKHRDKPIREQAENIIHLFTLTNLGAPAAFKYFDTTIDRKRYTSTKEVLDATLIHQSITGLYETRIDLSQLGGDSGGSSGGSSGSETPGTSESATPESSGGSSGGSSRWEHRFELKPGRWVFVPTEEAMEQGKEIKKQVEKRWKPPAYYYHLRQGGHVAALRCHLDNPWFAHVDLEDFFGQINRSRVTRALKGFFSYEEAWEMACESTVRRPPDSEFMLPYGFVQSPILASLALDKSALGRYLRQLNKNDGLTVSVYMDDIVISGDDEEMLEQAFDELKQAAEKSGFPLNEEKTQGPASQITAFNIELSHNSMEITEERMAEFQEAYRQGNEHQKEGILGYVGSVNPAQSGGSKRTADGSEFEPKKKRKV

SEQ ID NO: 1495 - protein, 1682 aa, synthetic construct
MKRTADGSEFESPKKKRKVDKKYSIGLDIGTNSVGWAVITDEYKVPSKKFKVLGNTDRHSIKKNLIGALLFDSGETAEATRLKRTARRRYTRRKNRICYLQEIFSNEMAKVDDSFFHRLEESFLVEEDKKHERHPIFGNIVDEVAYHEKYPTIYHLRKKLVDSTDKADLRLIYLALAHMIKFRGHFLIEGDLNPDNSDVDKLFIQLVQTYNQLFEENPINASGVDAKAILSARLSKSRRLENLIAQLPGEKKNGLFGNLIALSLGLTPNFKSNFDLAEDAKLQLSKDTYDDDLDNLLAQIGDQYADLFLAAKNLSDAILLSDILRVNTEITKAPLSASMIKRYDEHHQDLTLLKALVRQQLPEKYKEIFFDQSKNGYAGYIDGGASQEEFYKFIKPILEKMDGTEELLVKLNREDLLRKQRTFDNGSIPHQIHLGELHAILRRQEDFYPFLKDNREKIEKILTFRIPYYVGPLARGNSRFAWMTRKSEETITPWNFEEVVDKGASAQSFIERMTNFDKNLPNEKVLPKHSLLYEYFTVYNELTKVKYVTEGMRKPAFLSGEQKKAIVDLLFKTNRKVTVKQLKEDYFKKIECFDSVEISGVEDRFNASLGTYHDLLKIIKDKDFLDNEENEDILEDIVLTLTLFEDREMIEERLKTYAHLFDDKVMKQLKRRRYTGWGRLSRKLINGIRDKQSGKTILDFLKSDGFANRNFMQLIHDDSLTFKEDIQKAQVSGQGDSLHEHIANLAGSPAIKKGILQTVKVVDELVKVMGRHKPENIVIEMARENQTTQKGQKNSRERMKRIEEGIKELGSQILKEHPVENTQLQNEKLYLYYLQNGRDMYVDQELDINRLSDYDVDAIVPQSFLKDDSIDNKVLTRSDKNRGKSDNVPSEEVVKKMKNYWRQLLNAKLITQRKFDNLTKAERGGLSELDKAGFIKRQLVETRQITKHVAQILDSRMNTKYDENDKLIREVKVITLKSKLVSDFRKDFQFYKVREINNYHHAHDAYLNAVVGTALIKKYPKLESEFVYGDYKVYDVRKMIAKSEQEIGKATAKYFFYSNIMNFFKTEITLANGEIRKRPLIETNGETGEIVWDKGRDFATVRKVLSMPQVNIVKKTEVQTGGFSKESILPKRNSDKLIARKKDWDPKKYGGFDSPTVAYSVLVVAKVEKGKSKKLKSVKELLGITIMERSSFEKNPIDFLEAKGYKEVKKDLIIKLPKYSLFELENGRKRMLASAGELQKGNELALPSKYVNFLYLASHYEKLKGSPEDNEQKQLFVEQHKHYLDEIIEQISEFSKRVILADANLDKVLSAYNKHRDKPIREQAENIIHLFTLTNLGAPAAFKYFDTTIDRKRYTSTKEVLDATLIHQSITGLYETRIDLSQLGGDSGGSSGGSSGSETPGTSESATPESSGGSSGGSSRWEHRFELKPGRWVFVPTEEAREQGKEIKKQVEKRWKPPAYYYRLRQGGHVAALRCHLDNPWFAHVDLEDFFGQINRSRVTRALKGFFSYEEAWEMACESTVRRPPDSEFMLPYGFVQSPILASLAFDKSALGRYLRQLNKNDGLTVSVYMDDIVISGDDEEMLEQAFDELKQAAEKSGFPLNEEKTDGPASQISAFNIELSHNVMEITEERMAEFQEAYRQGNEHQKEGILGYVGSVNPAQSGGSKRTADGSEFEPKKKRKV

SEQ ID NO: 1496 - protein, 1682 aa, synthetic construct
MKRTADGSEFESPKKKRKVDKKYSIGLDIGTNSVGWAVITDEYKVPSKKFKVLGNTDRHSIKKNLIGALLFDSGETAEATRLKRTARRRYTRRKNRICYLQEIFSNEMAKVDDSFFHRLEESFLVEEDKKHERHPIFGNIVDEVAYHEKYPTIYHLRKKLVDSTDKADLRLIYLALAHMIKFRGHFLIEGDLNPDNSDVDKLFIQLVQTYNQLFEENPINASGVDAKAILSARLSKSRRLENLIAQLPGEKKNGLFGNLIALSLGLTPNFKSNFDLAEDAKLQLSKDTYDDDLDNLLAQIGDQYADLFLAAKNLSDAILLSDILRVNTEITKAPLSASMIKRYDEHHQDLTLLKALVRQQLPEKYKEIFFDQSKNGYAGYIDGGASQEEFYKFIKPILEKMDGTEELLVKLNREDLLRKQRTFDNGSIPHQIHLGELHAILRRQEDFYPFLKDNREKIEKILTFRIPYYVGPLARGNSRFAWMTRKSEETITPWNFEEVVDKGASAQSFIERMTNFDKNLPNEKVLPKHSLLYEYFTVYNELTKVKYVTEGMRKPAFLSGEQKKAIVDLLFKTNRKVTVKQLKEDYFKKIECFDSVEISGVEDRFNASLGTYHDLLKIIKDKDFLDNEENEDILEDIVLTLTLFEDREMIEERLKTYAHLFDDKVMKQLKRRRYTGWGRLSRKLINGIRDKQSGKTILDFLKSDGFANRNFMQLIHDDSLTFKEDIQKAQVSGQGDSLHEHIANLAGSPAIKKGILQTVKVVDELVKVMGRHKPENIVIEMARENQTTQKGQKNSRERMKRIEEGIKELGSQILKEHPVENTQLQNEKLYLYYLQNGRDMYVDQELDINRLSDYDVDAIVPQSFLKDDSIDNKVLTRSDKNRGKSDNVPSEEVVKKMKNYWRQLLNAKLITQRKFDNLTKAERGGLSELDKAGFIKRQLVETRQITKHVAQILDSRMNTKYDENDKLIREVKVITLKSKLVSDFRKDFQFYKVREINNYHHAHDAYLNAVVGTALIKKYPKLESEFVYGDYKVYDVRKMIAKSEQEIGKATAKYFFYSNIMNFFKTEITLANGEIRKRPLIETNGETGEIVWDKGRDFATVRKVLSMPQVNIVKKTEVQTGGFSKESILPKRNSDKLIARKKDWDPKKYGGFDSPTVAYSVLVVAKVEKGKSKKLKSVKELLGITIMERSSFEKNPIDFLEAKGYKEVKKDLIIKLPKYSLFELENGRKRMLASAGELQKGNELALPSKYVNFLYLASHYEKLKGSPEDNEQKQLFVEQHKHYLDEIIEQISEFSKRVILADANLDKVLSAYNKHRDKPIREQAENIIHLFTLTNLGAPAAFKYFDTTIDRKRYTSTKEVLDATLIHQSITGLYETRIDLSQLGGDSGGSSGGSSGSETPGTSESATPESSGGSSGGSSRWEHRFELKPGRWVFVPTEEAREQGKEIKKQVEKRWKPPAYCYRLRQGGHVAALRCHLDNPWFAHVDLEDFFGQINRSRVTRALKGFFSYEEAWEMACESTVRRPPDSEFMLPYGFVQSPILATLAMDKSALGRYLRQLNKNDGLTVSVYMDDIVISGDDEEMLEQAFDELKQAAEKSGFPLNEEKTDGPASQISAFNIELSHNVMEITEERMAEFQEAYRQGNEHQKEGILGYVGSVNPAQSGGSKRTADGSEFEPKKKRKV

SEQ ID NO: 1497 - protein, 1682 aa, synthetic construct
MKRTADGSEFESPKKKRKVDKKYSIGLDIGTNSVGWAVITDEYKVPSKKFKVLGNTDRHSIKKNLIGALLFDSGETAEATRLKRTARRRYTRRKNRICYLQEIFSNEMAKVDDSFFHRLEESFLVEEDKKHERHPIFGNIVDEVAYHEKYPTIYHLRKKLVDSTDKADLRLIYLALAHMIKFRGHFLIEGDLNPDNSDVDKLFIQLVQTYNQLFEENPINASGVDAKAILSARLSKSRRLENLIAQLPGEKKNGLFGNLIALSLGLTPNFKSNFDLAEDAKLQLSKDTYDDDLDNLLAQIGDQYADLFLAAKNLSDAILLSDILRVNTEITKAPLSASMIKRYDEHHQDLTLLKALVRQQLPEKYKEIFFDQSKNGYAGYIDGGASQEEFYKFIKPILEKMDGTEELLVKLNREDLLRKQRTFDNGSIPHQIHLGELHAILRRQEDFYPFLKDNREKIEKILTFRIPYYVGPLARGNSRFAWMTRKSEETITPWNFEEVVDKGASAQSFIERMTNFDKNLPNEKVLPKHSLLYEYFTVYNELTKVKYVTEGMRKPAFLSGEQKKAIVDLLFKTNRKVTVKQLKEDYFKKIECFDSVEISGVEDRFNASLGTYHDLLKIIKDKDFLDNEENEDILEDIVLTLTLFEDREMIEERLKTYAHLFDDKVMKQLKRRRYTGWGRLSRKLINGIRDKQSGKTILDFLKSDGFANRNFMQLIHDDSLTFKEDIQKAQVSGQGDSLHEHIANLAGSPAIKKGILQTVKVVDELVKVMGRHKPENIVIEMARENQTTQKGQKNSRERMKRIEEGIKELGSQILKEHPVENTQLQNEKLYLYYLQNGRDMYVDQELDINRLSDYDVDAIVPQSFLKDDSIDNKVLTRSDKNRGKSDNVPSEEVVKKMKNYWRQLLNAKLITQRKFDNLTKAERGGLSELDKAGFIKRQLVETRQITKHVAQILDSRMNTKYDENDKLIREVKVITLKSKLVSDFRKDFQFYKVREINNYHHAHDAYLNAVVGTALIKKYPKLESEFVYGDYKVYDVRKMIAKSEQEIGKATAKYFFYSNIMNFFKTEITLANGEIRKRPLIETNGETGEIVWDKGRDFATVRKVLSMPQVNIVKKTEVQTGGFSKESILPKRNSDKLIARKKDWDPKKYGGFDSPTVAYSVLVVAKVEKGKSKKLKSVKELLGITIMERSSFEKNPIDFLEAKGYKEVKKDLIIKLPKYSLFELENGRKRMLASAGELQKGNELALPSKYVNFLYLASHYEKLKGSPEDNEQKQLFVEQHKHYLDEIIEQISEFSKRVILADANLDKVLSAYNKHRDKPIREQAENIIHLFTLTNLGAPAAFKYFDTTIDRKRYTSTKEVLDATLIHQSITGLYETRIDLSQLGGDSGGSSGGSSGSETPGTSESATPESSGGSSGGSSRWEHRFELKPGRWVFVPTEEAREQGKEIKKQVEKRWKPPAYYYRLRQGGHVAALRCHLDNPWFAHVDLEDFFGQINRSRVTRALKGFFSYEEAWEMACESTVRRPPDSEFMLPYGFVQSPILATLAMDKSALGRYLRQLNKNDGLTVSVYMDDIVISGDDEEMLEQAFDELKQAAEKSGFPLNEEKTDGPASQISAFNIELSHNVMEITEERMAEFQEAYRQGNEHQKEGILGYVGSVNPAQSGGSKRTADGSEFEPKKKRKV

SEQ ID NO: 1498 - protein, 1682 aa, synthetic construct
MKRTADGSEFESPKKKRKVDKKYSIGLDIGTNSVGWAVITDEYKVPSKKFKVLGNTDRHSIKKNLIGALLFDSGETAEATRLKRTARRRYTRRKNRICYLQEIFSNEMAKVDDSFFHRLEESFLVEEDKKHERHPIFGNIVDEVAYHEKYPTIYHLRKKLVDSTDKADLRLIYLALAHMIKFRGHFLIEGDLNPDNSDVDKLFIQLVQTYNQLFEENPINASGVDAKAILSARLSKSRRLENLIAQLPGEKKNGLFGNLIALSLGLTPNFKSNFDLAEDAKLQLSKDTYDDDLDNLLAQIGDQYADLFLAAKNLSDAILLSDILRVNTEITKAPLSASMIKRYDEHHQDLTLLKALVRQQLPEKYKEIFFDQSKNGYAGYIDGGASQEEFYKFIKPILEKMDGTEELLVKLNREDLLRKQRTFDNGSIPHQIHLGELHAILRRQEDFYPFLKDNREKIEKILTFRIPYYVGPLARGNSRFAWMTRKSEETITPWNFEEVVDKGASAQSFIERMTNFDKNLPNEKVLPKHSLLYEYFTVYNELTKVKYVTEGMRKPAFLSGEQKKAIVDLLFKTNRKVTVKQLKEDYFKKIECFDSVEISGVEDRFNASLGTYHDLLKIIKDKDFLDNEENEDILEDIVLTLTLFEDREMIEERLKTYAHLFDDKVMKQLKRRRYTGWGRLSRKLINGIRDKQSGKTILDFLKSDGFANRNFMQLIHDDSLTFKEDIQKAQVSGQGDSLHEHIANLAGSPAIKKGILQTVKVVDELVKVMGRHKPENIVIEMARENQTTQKGQKNSRERMKRIEEGIKELGSQILKEHPVENTQLQNEKLYLYYLQNGRDMYVDQELDINRLSDYDVDAIVPQSFLKDDSIDNKVLTRSDKNRGKSDNVPSEEVVKKMKNYWRQLLNAKLITQRKFDNLTKAERGGLSELDKAGFIKRQLVETRQITKHVAQILDSRMNTKYDENDKLIREVKVITLKSKLVSDFRKDFQFYKVREINNYHHAHDAYLNAVVGTALIKKYPKLESEFVYGDYKVYDVRKMIAKSEQEIGKATAKYFFYSNIMNFFKTEITLANGEIRKRPLIETNGETGEIVWDKGRDFATVRKVLSMPQVNIVKKTEVQTGGFSKESILPKRNSDKLIARKKDWDPKKYGGFDSPTVAYSVLVVAKVEKGKSKKLKSVKELLGITIMERSSFEKNPIDFLEAKGYKEVKKDLIIKLPKYSLFELENGRKRMLASAGELQKGNELALPSKYVNFLYLASHYEKLKGSPEDNEQKQLFVEQHKHYLDEIIEQISEFSKRVILADANLDKVLSAYNKHRDKPIREQAENIIHLFTLTNLGAPAAFKYFDTTIDRKRYTSTKEVLDATLIHQSITGLYETRIDLSQLGGDSGGSSGGSSGSETPGTSESATPESSGGSSGGSSRWEHRFELKPGRWVFVPTEEAREQGKEAKKQVEKRWKPPAYYYHLRQGGHVAALRCHLDNPWFAHVDLEDFFGQINRSRVTRALKGFFSYEEAWEMACESTVRRPPDSEFMLPYGFVQSPILASLALDKSALGRYLRQLNKNDGLTVSVYMDDIVISGDDEEMLEQAFDELKQAAEKSGFPLNEEKTQGPASQITAFNIELSHNSMEITEERMAEFQEAYRQGNEHQKEGILGYVGSVNPAQSGGSKRTADGSEFEPKKKRKV

SEQ ID NO: 1499 - protein, 1682 aa, synthetic construct
MKRTADGSEFESPKKKRKVDKKYSIGLDIGTNSVGWAVITDEYKVPSKKFKVLGNTDRHSIKKNLIGALLFDSGETAEATRLKRTARRRYTRRKNRICYLQEIFSNEMAKVDDSFFHRLEESFLVEEDKKHERHPIFGNIVDEVAYHEKYPTIYHLRKKLVDSTDKADLRLIYLALAHMIKFRGHFLIEGDLNPDNSDVDKLFIQLVQTYNQLFEENPINASGVDAKAILSARLSKSRRLENLIAQLPGEKKNGLFGNLIALSLGLTPNFKSNFDLAEDAKLQLSKDTYDDDLDNLLAQIGDQYADLFLAAKNLSDAILLSDILRVNTEITKAPLSASMIKRYDEHHQDLTLLKALVRQQLPEKYKEIFFDQSKNGYAGYIDGGASQEEFYKFIKPILEKMDGTEELLVKLNREDLLRKQRTFDNGSIPHQIHLGELHAILRRQEDFYPFLKDNREKIEKILTFRIPYYVGPLARGNSRFAWMTRKSEETITPWNFEEVVDKGASAQSFIERMTNFDKNLPNEKVLPKHSLLYEYFTVYNELTKVKYVTEGMRKPAFLSGEQKKAIVDLLFKTNRKVTVKQLKEDYFKKIECFDSVEISGVEDRFNASLGTYHDLLKIIKDKDFLDNEENEDILEDIVLTLTLFEDREMIEERLKTYAHLFDDKVMKQLKRRRYTGWGRLSRKLINGIRDKQSGKTILDFLKSDGFANRNFMQLIHDDSLTFKEDIQKAQVSGQGDSLHEHIANLAGSPAIKKGILQTVKVVDELVKVMGRHKPENIVIEMARENQTTQKGQKNSRERMKRIEEGIKELGSQILKEHPVENTQLQNEKLYLYYLQNGRDMYVDQELDINRLSDYDVDAIVPQSFLKDDSIDNKVLTRSDKNRGKSDNVPSEEVVKKMKNYWRQLLNAKLITQRKFDNLTKAERGGLSELDKAGFIKRQLVETRQITKHVAQILDSRMNTKYDENDKLIREVKVITLKSKLVSDFRKDFQFYKVREINNYHHAHDAYLNAVVGTALIKKYPKLESEFVYGDYKVYDVRKMIAKSEQEIGKATAKYFFYSNIMNFFKTEITLANGEIRKRPLIETNGETGEIVWDKGRDFATVRKVLSMPQVNIVKKTEVQTGGFSKESILPKRNSDKLIARKKDWDPKKYGGFDSPTVAYSVLVVAKVEKGKSKKLKSVKELLGITIMERSSFEKNPIDFLEAKGYKEVKKDLIIKLPKYSLFELENGRKRMLASAGELQKGNELALPSKYVNFLYLASHYEKLKGSPEDNEQKQLFVEQHKHYLDEIIEQISEFSKRVILADANLDKVLSAYNKHRDKPIREQAENIIHLFTLTNLGAPAAFKYFDTTIDRKRYTSTKEVLDATLIHQSITGLYETRIDLSQLGGDSGGSSGGSSGSETPGTSESATPESSGGSSGGSSRWEHRFELKPGRWVFVPTEEAREQGKEIKKQVEKRWKPPAYYYHLRQGGHVAALRCHLDNPWFAIVDLEDFFGQINRSRVTRALKGFFSYEEAWEMACESTVRRPPDSEFMLPYGFVQSPILASLALDKSALGRYLRQLNKNDGLTVSVYMDDIVISGDDEEMLEQAFDELKQAAEKSGFPLNEEKTQGPASQITAFNIELSHNSMEITEERMAEFQEAYRQGNEHQKEGILGYVGSVNPAQSGGSKRTADGSEFEPKKKRKV

SEQ ID NO: 1500 - protein, 1682 aa, synthetic construct
MKRTADGSEFESPKKKRKVDKKYSIGLDIGTNSVGWAVITDEYKVPSKKFKVLGNTDRHSIKKNLIGALLFDSGETAEATRLKRTARRRYTRRKNRICYLQEIFSNEMAKVDDSFFHRLEESFLVEEDKKHERHPIFGNIVDEVAYHEKYPTIYHLRKKLVDSTDKADLRLIYLALAHMIKFRGHFLIEGDLNPDNSDVDKLFIQLVQTYNQLFEENPINASGVDAKAILSARLSKSRRLENLIAQLPGEKKNGLFGNLIALSLGLTPNFKSNFDLAEDAKLQLSKDTYDDDLDNLLAQIGDQYADLFLAAKNLSDAILLSDILRVNTEITKAPLSASMIKRYDEHHQDLTLLKALVRQQLPEKYKEIFFDQSKNGYAGYIDGGASQEEFYKFIKPILEKMDGTEELLVKLNREDLLRKQRTFDNGSIPHQIHLGELHAILRRQEDFYPFLKDNREKIEKILTFRIPYYVGPLARGNSRFAWMTRKSEETITPWNFEEVVDKGASAQSFIERMTNFDKNLPNEKVLPKHSLLYEYFTVYNELTKVKYVTEGMRKPAFLSGEQKKAIVDLLFKTNRKVTVKQLKEDYFKKIECFDSVEISGVEDRFNASLGTYHDLLKIIKDKDFLDNEENEDILEDIVLTLTLFEDREMIEERLKTYAHLFDDKVMKQLKRRRYTGWGRLSRKLINGIRDKQSGKTILDFLKSDGFANRNFMQLIHDDSLTFKEDIQKAQVSGQGDSLHEHIANLAGSPAIKKGILQTVKVVDELVKVMGRHKPENIVIEMARENQTTQKGQKNSRERMKRIEEGIKELGSQILKEHPVENTQLQNEKLYLYYLQNGRDMYVDQELDINRLSDYDVDAIVPQSFLKDDSIDNKVLTRSDKNRGKSDNVPSEEVVKKMKNYWRQLLNAKLITQRKFDNLTKAERGGLSELDKAGFIKRQLVETRQITKHVAQILDSRMNTKYDENDKLIREVKVITLKSKLVSDFRKDFQFYKVREINNYHHAHDAYLNAVVGTALIKKYPKLESEFVYGDYKVYDVRKMIAKSEQEIGKATAKYFFYSNIMNFFKTEITLANGEIRKRPLIETNGETGEIVWDKGRDFATVRKVLSMPQVNIVKKTEVQTGGFSKESILPKRNSDKLIARKKDWDPKKYGGFDSPTVAYSVLVVAKVEKGKSKKLKSVKELLGITIMERSSFEKNPIDFLEAKGYKEVKKDLIIKLPKYSLFELENGRKRMLASAGELQKGNELALPSKYVNFLYLASHYEKLKGSPEDNEQKQLFVEQHKHYLDEIIEQISEFSKRVILADANLDKVLSAYNKHRDKPIREQAENIIHLFTLTNLGAPAAFKYFDTTIDRKRYTSTKEVLDATLIHQSITGLYETRIDLSQLGGDSGGSSGGSSGSETPGTSESATPESSGGSSGGSSRWEHRFELKPGRWVFVPTEEAREQGKEIKKQVEKRWKPPAYYYHLRQGGHVAALRCHLDNPWFAKVDLEDFFGQINRSRVTRALKGFFSYEEAWEMACESTVRRPPDSEFMLPYGFVQSPILASLALDKSALGRYLRQLNKNDGLTVSVYMDDIVISGDDEEMLEQAFDELKQAAEKSGFPLNEEKTQGPASQITAFNIELSHNSMEITEERMAEFQEAYRQGNEHQKEGILGYVGSVNPAQSGGSKRTADGSEFEPKKKRKV

SEQ ID NO: 1501 - protein, 1682 aa, synthetic construct
MKRTADGSEFESPKKKRKVDKKYSIGLDIGTNSVGWAVITDEYKVPSKKFKVLGNTDRHSIKKNLIGALLFDSGETAEATRLKRTARRRYTRRKNRICYLQEIFSNEMAKVDDSFFHRLEESFLVEEDKKHERHPIFGNIVDEVAYHEKYPTIYHLRKKLVDSTDKADLRLIYLALAHMIKFRGHFLIEGDLNPDNSDVDKLFIQLVQTYNQLFEENPINASGVDAKAILSARLSKSRRLENLIAQLPGEKKNGLFGNLIALSLGLTPNFKSNFDLAEDAKLQLSKDTYDDDLDNLLAQIGDQYADLFLAAKNLSDAILLSDILRVNTEITKAPLSASMIKRYDEHHQDLTLLKALVRQQLPEKYKEIFFDQSKNGYAGYIDGGASQEEFYKFIKPILEKMDGTEELLVKLNREDLLRKQRTFDNGSIPHQIHLGELHAILRRQEDFYPFLKDNREKIEKILTFRIPYYVGPLARGNSRFAWMTRKSEETITPWNFEEVVDKGASAQSFIERMTNFDKNLPNEKVLPKHSLLYEYFTVYNELTKVKYVTEGMRKPAFLSGEQKKAIVDLLFKTNRKVTVKQLKEDYFKKIECFDSVEISGVEDRFNASLGTYHDLLKIIKDKDFLDNEENEDILEDIVLTLTLFEDREMIEERLKTYAHLFDDKVMKQLKRRRYTGWGRLSRKLINGIRDKQSGKTILDFLKSDGFANRNFMQLIHDDSLTFKEDIQKAQVSGQGDSLHEHIANLAGSPAIKKGILQTVKVVDELVKVMGRHKPENIVIEMARENQTTQKGQKNSRERMKRIEEGIKELGSQILKEHPVENTQLQNEKLYLYYLQNGRDMYVDQELDINRLSDYDVDAIVPQSFLKDDSIDNKVLTRSDKNRGKSDNVPSEEVVKKMKNYWRQLLNAKLITQRKFDNLTKAERGGLSELDKAGFIKRQLVETRQITKHVAQILDSRMNTKYDENDKLIREVKVITLKSKLVSDFRKDFQFYKVREINNYHHAHDAYLNAVVGTALIKKYPKLESEFVYGDYKVYDVRKMIAKSEQEIGKATAKYFFYSNIMNFFKTEITLANGEIRKRPLIETNGETGEIVWDKGRDFATVRKVLSMPQVNIVKKTEVQTGGFSKESILPKRNSDKLIARKKDWDPKKYGGFDSPTVAYSVLVVAKVEKGKSKKLKSVKELLGITIMERSSFEKNPIDFLEAKGYKEVKKDLIIKLPKYSLFELENGRKRMLASAGELQKGNELALPSKYVNFLYLASHYEKLKGSPEDNEQKQLFVEQHKHYLDEIIEQISEFSKRVILADANLDKVLSAYNKHRDKPIREQAENIIHLFTLTNLGAPAAFKYFDTTIDRKRYTSTKEVLDATLIHQSITGLYETRIDLSQLGGDSGGSSGGSSGSETPGTSESATPESSGGSSGGSSRWEHRFELKPGRWVFVPTEEAREQGKEIKKQVEKRWKPPAYYYHLRQGGHVAALRCHLDNPWFAHVDLEDFFGQINRDRVTRALKGFFSYEEAWEMACESTVRRPPDSEFMLPYGFVQSPILASLALDKSALGRYLRQLNKNDGLTVSVYMDDIVISGDDEEMLEQAFDELKQAAEKSGFPLNEEKTQGPASQITAFNIELSHNSMEITEERMAEFQEAYRQGNEHQKEGILGYVGSVNPAQSGGSKRTADGSEFEPKKKRKV

SEQ ID NO: 1502 - protein, 1682 aa, synthetic construct
MKRTADGSEFESPKKKRKVDKKYSIGLDIGTNSVGWAVITDEYKVPSKKFKVLGNTDRHSIKKNLIGALLFDSGETAEATRLKRTARRRYTRRKNRICYLQEIFSNEMAKVDDSFFHRLEESFLVEEDKKHERHPIFGNIVDEVAYHEKYPTIYHLRKKLVDSTDKADLRLIYLALAHMIKFRGHFLIEGDLNPDNSDVDKLFIQLVQTYNQLFEENPINASGVDAKAILSARLSKSRRLENLIAQLPGEKKNGLFGNLIALSLGLTPNFKSNFDLAEDAKLQLSKDTYDDDLDNLLAQIGDQYADLFLAAKNLSDAILLSDILRVNTEITKAPLSASMIKRYDEHHQDLTLLKALVRQQLPEKYKEIFFDQSKNGYAGYIDGGASQEEFYKFIKPILEKMDGTEELLVKLNREDLLRKQRTFDNGSIPHQIHLGELHAILRRQEDFYPFLKDNREKIEKILTFRIPYYVGPLARGNSRFAWMTRKSEETITPWNFEEVVDKGASAQSFIERMTNFDKNLPNEKVLPKHSLLYEYFTVYNELTKVKYVTEGMRKPAFLSGEQKKAIVDLLFKTNRKVTVKQLKEDYFKKIECFDSVEISGVEDRFNASLGTYHDLLKIIKDKDFLDNEENEDILEDIVLTLTLFEDREMIEERLKTYAHLFDDKVMKQLKRRRYTGWGRLSRKLINGIRDKQSGKTILDFLKSDGFANRNFMQLIHDDSLTFKEDIQKAQVSGQGDSLHEHIANLAGSPAIKKGILQTVKVVDELVKVMGRHKPENIVIEMARENQTTQKGQKNSRERMKRIEEGIKELGSQILKEHPVENTQLQNEKLYLYYLQNGRDMYVDQELDINRLSDYDVDAIVPQSFLKDDSIDNKVLTRSDKNRGKSDNVPSEEVVKKMKNYWRQLLNAKLITQRKFDNLTKAERGGLSELDKAGFIKRQLVETRQITKHVAQILDSRMNTKYDENDKLIREVKVITLKSKLVSDFRKDFQFYKVREINNYHHAHDAYLNAVVGTALIKKYPKLESEFVYGDYKVYDVRKMIAKSEQEIGKATAKYFFYSNIMNFFKTEITLANGEIRKRPLIETNGETGEIVWDKGRDFATVRKVLSMPQVNIVKKTEVQTGGFSKESILPKRNSDKLIARKKDWDPKKYGGFDSPTVAYSVLVVAKVEKGKSKKLKSVKELLGITIMERSSFEKNPIDFLEAKGYKEVKKDLIIKLPKYSLFELENGRKRMLASAGELQKGNELALPSKYVNFLYLASHYEKLKGSPEDNEQKQLFVEQHKHYLDEIIEQISEFSKRVILADANLDKVLSAYNKHRDKPIREQAENIIHLFTLTNLGAPAAFKYFDTTIDRKRYTSTKEVLDATLIHQSITGLYETRIDLSQLGGDSGGSSGGSSGSETPGTSESATPESSGGSSGGSSRWEHRFELKPGRWVFVPTEEAREQGKEIKKQVEKRWKPPAYYYHLQQGGHVAALRCHLDNPWFAHVDLEDFFGQINRSRVTRALKGFFSCEEAWEMSCESTVRRPPDSEFMLPYGFVQSPILASLALDKSALGRYLRQLNKNDGLTVSVYMDDIVISGDDEEMLEQAFDELKQAAEKSGFPLNEEITQGPASQITAFNIELSHNSMEITEERMAEFQEAYRQGNEHQKEGILGYVGSVNPAQSGGSKRTADGSEFEPKKKRKV

SEQ ID NO: 1503 - protein, 1682 aa, synthetic construct
MKRTADGSEFESPKKKRKVDKKYSIGLDIGTNSVGWAVITDEYKVPSKKFKVLGNTDRHSIKKNLIGALLFDSGETAEATRLKRTARRRYTRRKNRICYLQEIFSNEMAKVDDSFFHRLEESFLVEEDKKHERHPIFGNIVDEVAYHEKYPTIYHLRKKLVDSTDKADLRLIYLALAHMIKFRGHFLIEGDLNPDNSDVDKLFIQLVQTYNQLFEENPINASGVDAKAILSARLSKSRRLENLIAQLPGEKKNGLFGNLIALSLGLTPNFKSNFDLAEDAKLQLSKDTYDDDLDNLLAQIGDQYADLFLAAKNLSDAILLSDILRVNTEITKAPLSASMIKRYDEHHQDLTLLKALVRQQLPEKYKEIFFDQSKNGYAGYIDGGASQEEFYKFIKPILEKMDGTEELLVKLNREDLLRKQRTFDNGSIPHQIHLGELHAILRRQEDFYPFLKDNREKIEKILTFRIPYYVGPLARGNSRFAWMTRKSEETITPWNFEEVVDKGASAQSFIERMTNFDKNLPNEKVLPKHSLLYEYFTVYNELTKVKYVTEGMRKPAFLSGEQKKAIVDLLFKTNRKVTVKQLKEDYFKKIECFDSVEISGVEDRFNASLGTYHDLLKIIKDKDFLDNEENEDILEDIVLTLTLFEDREMIEERLKTYAHLFDDKVMKQLKRRRYTGWGRLSRKLINGIRDKQSGKTILDFLKSDGFANRNFMQLIHDDSLTFKEDIQKAQVSGQGDSLHEHIANLAGSPAIKKGILQTVKVVDELVKVMGRHKPENIVIEMARENQTTQKGQKNSRERMKRIEEGIKELGSQILKEHPVENTQLQNEKLYLYYLQNGRDMYVDQELDINRLSDYDVDAIVPQSFLKDDSIDNKVLTRSDKNRGKSDNVPSEEVVKKMKNYWRQLLNAKLITQRKFDNLTKAERGGLSELDKAGFIKRQLVETRQITKHVAQILDSRMNTKYDENDKLIREVKVITLKSKLVSDFRKDFQFYKVREINNYHHAHDAYLNAVVGTALIKKYPKLESEFVYGDYKVYDVRKMIAKSEQEIGKATAKYFFYSNIMNFFKTEITLANGEIRKRPLIETNGETGEIVWDKGRDFATVRKVLSMPQVNIVKKTEVQTGGFSKESILPKRNSDKLIARKKDWDPKKYGGFDSPTVAYSVLVVAKVEKGKSKKLKSVKELLGITIMERSSFEKNPIDFLEAKGYKEVKKDLIIKLPKYSLFELENGRKRMLASAGELQKGNELALPSKYVNFLYLASHYEKLKGSPEDNEQKQLFVEQHKHYLDEIIEQISEFSKRVILADANLDKVLSAYNKHRDKPIREQAENIIHLFTLTNLGAPAAFKYFDTTIDRKRYTSTKEVLDATLIHQSITGLYETRIDLSQLGGDSGGSSGGSSGSETPGTSESATPESSGGSSGGSSRWEHRFELKPGRWVFVPTEEAREQGKEIKKQVEKRWKPPAYYYHLRQGGHVAALRCHLDNPWFAHVDLEDFFGQINRSRVTRALKGFFSYEEAIEMACESTVRRPPDSEFMLPYGFVQSPILASLALDKSALGRYLRQLNKNDGLTVSVYMDDIVISGDDEEMLEQAFDELKQAAEKSGFPLNEEKTQGPASQITAFNIELSHNSMEITEERAAEFQEAYCQGNEHQKEGILGYVGNVNPAQSGGSKRTADGSEFEPKKKRKV

SEQ ID NO: 1504 - protein, 1682 aa, synthetic construct
MKRTADGSEFESPKKKRKVDKKYSIGLDIGTNSVGWAVITDEYKVPSKKFKVLGNTDRHSIKKNLIGALLFDSGETAEATRLKRTARRRYTRRKNRICYLQEIFSNEMAKVDDSFFHRLEESFLVEEDKKHERHPIFGNIVDEVAYHEKYPTIYHLRKKLVDSTDKADLRLIYLALAHMIKFRGHFLIEGDLNPDNSDVDKLFIQLVQTYNQLFEENPINASGVDAKAILSARLSKSRRLENLIAQLPGEKKNGLFGNLIALSLGLTPNFKSNFDLAEDAKLQLSKDTYDDDLDNLLAQIGDQYADLFLAAKNLSDAILLSDILRVNTEITKAPLSASMIKRYDEHHQDLTLLKALVRQQLPEKYKEIFFDQSKNGYAGYIDGGASQEEFYKFIKPILEKMDGTEELLVKLNREDLLRKQRTFDNGSIPHQIHLGELHAILRRQEDFYPFLKDNREKIEKILTFRIPYYVGPLARGNSRFAWMTRKSEETITPWNFEEVVDKGASAQSFIERMTNFDKNLPNEKVLPKHSLLYEYFTVYNELTKVKYVTEGMRKPAFLSGEQKKAIVDLLFKTNRKVTVKQLKEDYFKKIECFDSVEISGVEDRFNASLGTYHDLLKIIKDKDFLDNEENEDILEDIVLTLTLFEDREMIEERLKTYAHLFDDKVMKQLKRRRYTGWGRLSRKLINGIRDKQSGKTILDFLKSDGFANRNFMQLIHDDSLTFKEDIQKAQVSGQGDSLHEHIANLAGSPAIKKGILQTVKVVDELVKVMGRHKPENIVIEMARENQTTQKGQKNSRERMKRIEEGIKELGSQILKEHPVENTQLQNEKLYLYYLQNGRDMYVDQELDINRLSDYDVDAIVPQSFLKDDSIDNKVLTRSDKNRGKSDNVPSEEVVKKMKNYWRQLLNAKLITQRKFDNLTKAERGGLSELDKAGFIKRQLVETRQITKHVAQILDSRMNTKYDENDKLIREVKVITLKSKLVSDFRKDFQFYKVREINNYHHAHDAYLNAVVGTALIKKYPKLESEFVYGDYKVYDVRKMIAKSEQEIGKATAKYFFYSNIMNFFKTEITLANGEIRKRPLIETNGETGEIVWDKGRDFATVRKVLSMPQVNIVKKTEVQTGGFSKESILPKRNSDKLIARKKDWDPKKYGGFDSPTVAYSVLVVAKVEKGKSKKLKSVKELLGITIMERSSFEKNPIDFLEAKGYKEVKKDLIIKLPKYSLFELENGRKRMLASAGELQKGNELALPSKYVNFLYLASHYEKLKGSPEDNEQKQLFVEQHKHYLDEIIEQISEFSKRVILADANLDKVLSAYNKHRDKPIREQAENIIHLFTLTNLGAPAAFKYFDTTIDRKRYTSTKEVLDATLIHQSITGLYETRIDLSQLGGDSGGSSGGSSGSETPGTSESATPESSGGSSGGSSRWEHRFELKPGRWVFVPTEEAREQGKEIKKQVEKRWKPPAYYYHLRQGGHVAALRCHLDNPWFAKVDLEDFFGQINRSRVTRALKGFFSSEEAWEMACESTVRRPPDSEFMLPYGFVQSPILASLALDKSALGRYLRQLNKNDGLTVSVYMDDIVISGDDEEMLEQAFDELKQAAEKSGFPLNEEKTQGPASQITAFNIELSHNSMEITEERMAEFQEAYRQGNEHQKEGILGYVGSVNPAQSGGSKRTADGSEFEPKKKRKV

SEQ ID NO: 1505 - protein, 1682 aa, synthetic construct
MKRTADGSEFESPKKKRKVDKKYSIGLDIGTNSVGWAVITDEYKVPSKKFKVLGNTDRHSIKKNLIGALLFDSGETAEATRLKRTARRRYTRRKNRICYLQEIFSNEMAKVDDSFFHRLEESFLVEEDKKHERHPIFGNIVDEVAYHEKYPTIYHLRKKLVDSTDKADLRLIYLALAHMIKFRGHFLIEGDLNPDNSDVDKLFIQLVQTYNQLFEENPINASGVDAKAILSARLSKSRRLENLIAQLPGEKKNGLFGNLIALSLGLTPNFKSNFDLAEDAKLQLSKDTYDDDLDNLLAQIGDQYADLFLAAKNLSDAILLSDILRVNTEITKAPLSASMIKRYDEHHQDLTLLKALVRQQLPEKYKEIFFDQSKNGYAGYIDGGASQEEFYKFIKPILEKMDGTEELLVKLNREDLLRKQRTFDNGSIPHQIHLGELHAILRRQEDFYPFLKDNREKIEKILTFRIPYYVGPLARGNSRFAWMTRKSEETITPWNFEEVVDKGASAQSFIERMTNFDKNLPNEKVLPKHSLLYEYFTVYNELTKVKYVTEGMRKPAFLSGEQKKAIVDLLFKTNRKVTVKQLKEDYFKKIECFDSVEISGVEDRFNASLGTYHDLLKIIKDKDFLDNEENEDILEDIVLTLTLFEDREMIEERLKTYAHLFDDKVMKQLKRRRYTGWGRLSRKLINGIRDKQSGKTILDFLKSDGFANRNFMQLIHDDSLTFKEDIQKAQVSGQGDSLHEHIANLAGSPAIKKGILQTVKVVDELVKVMGRHKPENIVIEMARENQTTQKGQKNSRERMKRIEEGIKELGSQILKEHPVENTQLQNEKLYLYYLQNGRDMYVDQELDINRLSDYDVDAIVPQSFLKDDSIDNKVLTRSDKNRGKSDNVPSEEVVKKMKNYWRQLLNAKLITQRKFDNLTKAERGGLSELDKAGFIKRQLVETRQITKHVAQILDSRMNTKYDENDKLIREVKVITLKSKLVSDFRKDFQFYKVREINNYHHAHDAYLNAVVGTALIKKYPKLESEFVYGDYKVYDVRKMIAKSEQEIGKATAKYFFYSNIMNFFKTEITLANGEIRKRPLIETNGETGEIVWDKGRDFATVRKVLSMPQVNIVKKTEVQTGGFSKESILPKRNSDKLIARKKDWDPKKYGGFDSPTVAYSVLVVAKVEKGKSKKLKSVKELLGITIMERSSFEKNPIDFLEAKGYKEVKKDLIIKLPKYSLFELENGRKRMLASAGELQKGNELALPSKYVNFLYLASHYEKLKGSPEDNEQKQLFVEQHKHYLDEIIEQISEFSKRVILADANLDKVLSAYNKHRDKPIREQAENIIHLFTLTNLGAPAAFKYFDTTIDRKRYTSTKEVLDATLIHQSITGLYETRIDLSQLGGDSGGSSGGSSGSETPGTSESATPESSGGSSGGSSRWEHRFELKPGRWVFVPTEEAREQGKEIKKQVEKRWKPPAYYYHLRQGGHVAALRCHLDNPWFAHVDLEDFFGQINRSRVTRALKGFFSREEAWEMACESTVRRPPDSEFMLPYGFVQSPILASLALDKSPLGRYLRQLNKNDGLTVSVYMDDIVISGDDEEMLEQAFDELKQAAEKSGFPLNEEKTQGPASQITAFNIELSHNSMEITEERMAEFQEAYRQGNEHQKEGILGYVGSVNPAQSGGSKRTADGSEFEPKKKRKV

SEQ ID NO: 1506 - protein, 1682 aa, synthetic construct
MKRTADGSEFESPKKKRKVDKKYSIGLDIGTNSVGWAVITDEYKVPSKKFKVLGNTDRHSIKKNLIGALLFDSGETAEATRLKRTARRRYTRRKNRICYLQEIFSNEMAKVDDSFFHRLEESFLVEEDKKHERHPIFGNIVDEVAYHEKYPTIYHLRKKLVDSTDKADLRLIYLALAHMIKFRGHFLIEGDLNPDNSDVDKLFIQLVQTYNQLFEENPINASGVDAKAILSARLSKSRRLENLIAQLPGEKKNGLFGNLIALSLGLTPNFKSNFDLAEDAKLQLSKDTYDDDLDNLLAQIGDQYADLFLAAKNLSDAILLSDILRVNTEITKAPLSASMIKRYDEHHQDLTLLKALVRQQLPEKYKEIFFDQSKNGYAGYIDGGASQEEFYKFIKPILEKMDGTEELLVKLNREDLLRKQRTFDNGSIPHQIHLGELHAILRRQEDFYPFLKDNREKIEKILTFRIPYYVGPLARGNSRFAWMTRKSEETITPWNFEEVVDKGASAQSFIERMTNFDKNLPNEKVLPKHSLLYEYFTVYNELTKVKYVTEGMRKPAFLSGEQKKAIVDLLFKTNRKVTVKQLKEDYFKKIECFDSVEISGVEDRFNASLGTYHDLLKIIKDKDFLDNEENEDILEDIVLTLTLFEDREMIEERLKTYAHLFDDKVMKQLKRRRYTGWGRLSRKLINGIRDKQSGKTILDFLKSDGFANRNFMQLIHDDSLTFKEDIQKAQVSGQGDSLHEHIANLAGSPAIKKGILQTVKVVDELVKVMGRHKPENIVIEMARENQTTQKGQKNSRERMKRIEEGIKELGSQILKEHPVENTQLQNEKLYLYYLQNGRDMYVDQELDINRLSDYDVDAIVPQSFLKDDSIDNKVLTRSDKNRGKSDNVPSEEVVKKMKNYWRQLLNAKLITQRKFDNLTKAERGGLSELDKAGFIKRQLVETRQITKHVAQILDSRMNTKYDENDKLIREVKVITLKSKLVSDFRKDFQFYKVREINNYHHAHDAYLNAVVGTALIKKYPKLESEFVYGDYKVYDVRKMIAKSEQEIGKATAKYFFYSNIMNFFKTEITLANGEIRKRPLIETNGETGEIVWDKGRDFATVRKVLSMPQVNIVKKTEVQTGGFSKESILPKRNSDKLIARKKDWDPKKYGGFDSPTVAYSVLVVAKVEKGKSKKLKSVKELLGITIMERSSFEKNPIDFLEAKGYKEVKKDLIIKLPKYSLFELENGRKRMLASAGELQKGNELALPSKYVNFLYLASHYEKLKGSPEDNEQKQLFVEQHKHYLDEIIEQISEFSKRVILADANLDKVLSAYNKHRDKPIREQAENIIHLFTLTNLGAPAAFKYFDTTIDRKRYTSTKEVLDATLIHQSITGLYETRIDLSQLGGDSGGSSGGSSGSETPGTSESATPESSGGSSGGSSRWEHRFELKPGRWVFVPTEEAREQGKEIKKQVEKRWKPPAYYYHLRQGGHVAALRCHLDNPWFAKVDLEDFFGQINRSRVTRALKGFFSYEEAWEMACESTVRRPPDSEFMLPYGFVQSPILATLAFDKSALGRYLRQLNKNDGLTVSVYMDDIVISGDDEEMLEQAFDELKQAAEKSGFPLNEEKTQGPASQITAFNIELSHNSMEITEERMAEFQEAYRQGNEHQKEGILGYVGSVNPAQSGGSKRTADGSEFEPKKKRKV

SEQ ID NO: 1507 - protein, 1682 aa, synthetic construct
MKRTADGSEFESPKKKRKVDKKYSIGLDIGTNSVGWAVITDEYKVPSKKFKVLGNTDRHSIKKNLIGALLFDSGETAEATRLKRTARRRYTRRKNRICYLQEIFSNEMAKVDDSFFHRLEESFLVEEDKKHERHPIFGNIVDEVAYHEKYPTIYHLRKKLVDSTDKADLRLIYLALAHMIKFRGHFLIEGDLNPDNSDVDKLFIQLVQTYNQLFEENPINASGVDAKAILSARLSKSRRLENLIAQLPGEKKNGLFGNLIALSLGLTPNFKSNFDLAEDAKLQLSKDTYDDDLDNLLAQIGDQYADLFLAAKNLSDAILLSDILRVNTEITKAPLSASMIKRYDEHHQDLTLLKALVRQQLPEKYKEIFFDQSKNGYAGYIDGGASQEEFYKFIKPILEKMDGTEELLVKLNREDLLRKQRTFDNGSIPHQIHLGELHAILRRQEDFYPFLKDNREKIEKILTFRIPYYVGPLARGNSRFAWMTRKSEETITPWNFEEVVDKGASAQSFIERMTNFDKNLPNEKVLPKHSLLYEYFTVYNELTKVKYVTEGMRKPAFLSGEQKKAIVDLLFKTNRKVTVKQLKEDYFKKIECFDSVEISGVEDRFNASLGTYHDLLKIIKDKDFLDNEENEDILEDIVLTLTLFEDREMIEERLKTYAHLFDDKVMKQLKRRRYTGWGRLSRKLINGIRDKQSGKTILDFLKSDGFANRNFMQLIHDDSLTFKEDIQKAQVSGQGDSLHEHIANLAGSPAIKKGILQTVKVVDELVKVMGRHKPENIVIEMARENQTTQKGQKNSRERMKRIEEGIKELGSQILKEHPVENTQLQNEKLYLYYLQNGRDMYVDQELDINRLSDYDVDAIVPQSFLKDDSIDNKVLTRSDKNRGKSDNVPSEEVVKKMKNYWRQLLNAKLITQRKFDNLTKAERGGLSELDKAGFIKRQLVETRQITKHVAQILDSRMNTKYDENDKLIREVKVITLKSKLVSDFRKDFQFYKVREINNYHHAHDAYLNAVVGTALIKKYPKLESEFVYGDYKVYDVRKMIAKSEQEIGKATAKYFFYSNIMNFFKTEITLANGEIRKRPLIETNGETGEIVWDKGRDFATVRKVLSMPQVNIVKKTEVQTGGFSKESILPKRNSDKLIARKKDWDPKKYGGFDSPTVAYSVLVVAKVEKGKSKKLKSVKELLGITIMERSSFEKNPIDFLEAKGYKEVKKDLIIKLPKYSLFELENGRKRMLASAGELQKGNELALPSKYVNFLYLASHYEKLKGSPEDNEQKQLFVEQHKHYLDEIIEQISEFSKRVILADANLDKVLSAYNKHRDKPIREQAENIIHLFTLTNLGAPAAFKYFDTTIDRKRYTSTKEVLDATLIHQSITGLYETRIDLSQLGGDSGGSSGGSSGSETPGTSESATPESSGGSSGGSSRWEHRFELKPGRWVFVPTEEAREQGKEIKKQVEKRWKPPAYYYHLRQGGHVAALRCHLDNPWFAHVDLEDFFGQINRSRVTRALKGFFSNEEAWEMACESTVRRPPDSEFMLPYGFVQSPILATLAFDKSALGRYLRQLNKNDGLTVSVYMDDIVISGDDEEMLEQAFDELKQAAEKSGFPLNEEKTQGPASQITAFNIELSHNSMEITEERMAEFQEAYRQGNEHQKEGILGYVGSVNPAQSGGSKRTADGSEFEPKKKRKV

SEQ ID NO: 1508 - protein, 1682 aa, synthetic construct
MKRTADGSEFESPKKKRKVDKKYSIGLDIGTNSVGWAVITDEYKVPSKKFKVLGNTDRHSIKKNLIGALLFDSGETAEATRLKRTARRRYTRRKNRICYLQEIFSNEMAKVDDSFFHRLEESFLVEEDKKHERHPIFGNIVDEVAYHEKYPTIYHLRKKLVDSTDKADLRLIYLALAHMIKFRGHFLIEGDLNPDNSDVDKLFIQLVQTYNQLFEENPINASGVDAKAILSARLSKSRRLENLIAQLPGEKKNGLFGNLIALSLGLTPNFKSNFDLAEDAKLQLSKDTYDDDLDNLLAQIGDQYADLFLAAKNLSDAILLSDILRVNTEITKAPLSASMIKRYDEHHQDLTLLKALVRQQLPEKYKEIFFDQSKNGYAGYIDGGASQEEFYKFIKPILEKMDGTEELLVKLNREDLLRKQRTFDNGSIPHQIHLGELHAILRRQEDFYPFLKDNREKIEKILTFRIPYYVGPLARGNSRFAWMTRKSEETITPWNFEEVVDKGASAQSFIERMTNFDKNLPNEKVLPKHSLLYEYFTVYNELTKVKYVTEGMRKPAFLSGEQKKAIVDLLFKTNRKVTVKQLKEDYFKKIECFDSVEISGVEDRFNASLGTYHDLLKIIKDKDFLDNEENEDILEDIVLTLTLFEDREMIEERLKTYAHLFDDKVMKQLKRRRYTGWGRLSRKLINGIRDKQSGKTILDFLKSDGFANRNFMQLIHDDSLTFKEDIQKAQVSGQGDSLHEHIANLAGSPAIKKGILQTVKVVDELVKVMGRHKPENIVIEMARENQTTQKGQKNSRERMKRIEEGIKELGSQILKEHPVENTQLQNEKLYLYYLQNGRDMYVDQELDINRLSDYDVDAIVPQSFLKDDSIDNKVLTRSDKNRGKSDNVPSEEVVKKMKNYWRQLLNAKLITQRKFDNLTKAERGGLSELDKAGFIKRQLVETRQITKHVAQILDSRMNTKYDENDKLIREVKVITLKSKLVSDFRKDFQFYKVREINNYHHAHDAYLNAVVGTALIKKYPKLESEFVYGDYKVYDVRKMIAKSEQEIGKATAKYFFYSNIMNFFKTEITLANGEIRKRPLIETNGETGEIVWDKGRDFATVRKVLSMPQVNIVKKTEVQTGGFSKESILPKRNSDKLIARKKDWDPKKYGGFDSPTVAYSVLVVAKVEKGKSKKLKSVKELLGITIMERSSFEKNPIDFLEAKGYKEVKKDLIIKLPKYSLFELENGRKRMLASAGELQKGNELALPSKYVNFLYLASHYEKLKGSPEDNEQKQLFVEQHKHYLDEIIEQISEFSKRVILADANLDKVLSAYNKHRDKPIREQAENIIHLFTLTNLGAPAAFKYFDTTIDRKRYTSTKEVLDATLIHQSITGLYETRIDLSQLGGDSGGSSGGSSGSETPGTSESATPESSGGSSGGSSRWEHRFELKPGRWVFVPTEEAREQGKEIKKQVEKRWKPPAYYYHLRQGGHVAALRCHLDNPWFAHVDLEDFFGQINRSRVTRALKGFFSSEEAWEMACESTVRRPPDSEFMLPYGFVQSPILATLAFDKSALGRYLRQLNKNDGLTVSVYMDDIVISGDDEEMLEQAFDELKQAAEKSGFPLNEEKTQGPASQITAFNIELSHNSMEITEERMAEFQEAYRQGNEHQKEGILGYVGSVNPAQSGGSKRTADGSEFEPKKKRKV

SEQ ID NO: 1509 - protein, 1682 aa, synthetic construct
MKRTADGSEFESPKKKRKVDKKYSIGLDIGTNSVGWAVITDEYKVPSKKFKVLGNTDRHSIKKNLIGALLFDSGETAEATRLKRTARRRYTRRKNRICYLQEIFSNEMAKVDDSFFHRLEESFLVEEDKKHERHPIFGNIVDEVAYHEKYPTIYHLRKKLVDSTDKADLRLIYLALAHMIKFRGHFLIEGDLNPDNSDVDKLFIQLVQTYNQLFEENPINASGVDAKAILSARLSKSRRLENLIAQLPGEKKNGLFGNLIALSLGLTPNFKSNFDLAEDAKLQLSKDTYDDDLDNLLAQIGDQYADLFLAAKNLSDAILLSDILRVNTEITKAPLSASMIKRYDEHHQDLTLLKALVRQQLPEKYKEIFFDQSKNGYAGYIDGGASQEEFYKFIKPILEKMDGTEELLVKLNREDLLRKQRTFDNGSIPHQIHLGELHAILRRQEDFYPFLKDNREKIEKILTFRIPYYVGPLARGNSRFAWMTRKSEETITPWNFEEVVDKGASAQSFIERMTNFDKNLPNEKVLPKHSLLYEYFTVYNELTKVKYVTEGMRKPAFLSGEQKKAIVDLLFKTNRKVTVKQLKEDYFKKIECFDSVEISGVEDRFNASLGTYHDLLKIIKDKDFLDNEENEDILEDIVLTLTLFEDREMIEERLKTYAHLFDDKVMKQLKRRRYTGWGRLSRKLINGIRDKQSGKTILDFLKSDGFANRNFMQLIHDDSLTFKEDIQKAQVSGQGDSLHEHIANLAGSPAIKKGILQTVKVVDELVKVMGRHKPENIVIEMARENQTTQKGQKNSRERMKRIEEGIKELGSQILKEHPVENTQLQNEKLYLYYLQNGRDMYVDQELDINRLSDYDVDAIVPQSFLKDDSIDNKVLTRSDKNRGKSDNVPSEEVVKKMKNYWRQLLNAKLITQRKFDNLTKAERGGLSELDKAGFIKRQLVETRQITKHVAQILDSRMNTKYDENDKLIREVKVITLKSKLVSDFRKDFQFYKVREINNYHHAHDAYLNAVVGTALIKKYPKLESEFVYGDYKVYDVRKMIAKSEQEIGKATAKYFFYSNIMNFFKTEITLANGEIRKRPLIETNGETGEIVWDKGRDFATVRKVLSMPQVNIVKKTEVQTGGFSKESILPKRNSDKLIARKKDWDPKKYGGFDSPTVAYSVLVVAKVEKGKSKKLKSVKELLGITIMERSSFEKNPIDFLEAKGYKEVKKDLIIKLPKYSLFELENGRKRMLASAGELQKGNELALPSKYVNFLYLASHYEKLKGSPEDNEQKQLFVEQHKHYLDEIIEQISEFSKRVILADANLDKVLSAYNKHRDKPIREQAENIIHLFTLTNLGAPAAFKYFDTTIDRKRYTSTKEVLDATLIHQSITGLYETRIDLSQLGGDSGGSSGGSSGSETPGTSESATPESSGGSSGGSSRWEHRFELKPGCWVFVPTEEAREQGKEIKKQVEKRWKPPAYYYHLRQGGHVAALRCHLDNPWFAHVDLEDFFGQINRSRVTRALKGFFSYEEAWEMACCSTVRRPPDSEFMLPYGFVQSPILASLALDKSALGRYLRQLNKNDGLTLSVYMDDIVISGDDEEMLEQAFDELKQAAEKSGFPLNEEKTQGPASQITAFNIELSHNSMEITEERMAEFQEAYRQGNEHQKFGILGYVGSVNPAQSGGSKRTADGSEFEPKKKRKV

SEQ ID NO: 1510 - protein, 1682 aa, synthetic construct
MKRTADGSEFESPKKKRKVDKKYSIGLDIGTNSVGWAVITDEYKVPSKKFKVLGNTDRHSIKKNLIGALLFDSGETAEATRLKRTARRRYTRRKNRICYLQEIFSNEMAKVDDSFFHRLEESFLVEEDKKHERHPIFGNIVDEVAYHEKYPTIYHLRKKLVDSTDKADLRLIYLALAHMIKFRGHFLIEGDLNPDNSDVDKLFIQLVQTYNQLFEENPINASGVDAKAILSARLSKSRRLENLIAQLPGEKKNGLFGNLIALSLGLTPNFKSNFDLAEDAKLQLSKDTYDDDLDNLLAQIGDQYADLFLAAKNLSDAILLSDILRVNTEITKAPLSASMIKRYDEHHQDLTLLKALVRQQLPEKYKEIFFDQSKNGYAGYIDGGASQEEFYKFIKPILEKMDGTEELLVKLNREDLLRKQRTFDNGSIPHQIHLGELHAILRRQEDFYPFLKDNREKIEKILTFRIPYYVGPLARGNSRFAWMTRKSEETITPWNFEEVVDKGASAQSFIERMTNFDKNLPNEKVLPKHSLLYEYFTVYNELTKVKYVTEGMRKPAFLSGEQKKAIVDLLFKTNRKVTVKQLKEDYFKKIECFDSVEISGVEDRFNASLGTYHDLLKIIKDKDFLDNEENEDILEDIVLTLTLFEDREMIEERLKTYAHLFDDKVMKQLKRRRYTGWGRLSRKLINGIRDKQSGKTILDFLKSDGFANRNFMQLIHDDSLTFKEDIQKAQVSGQGDSLHEHIANLAGSPAIKKGILQTVKVVDELVKVMGRHKPENIVIEMARENQTTQKGQKNSRERMKRIEEGIKELGSQILKEHPVENTQLQNEKLYLYYLQNGRDMYVDQELDINRLSDYDVDAIVPQSFLKDDSIDNKVLTRSDKNRGKSDNVPSEEVVKKMKNYWRQLLNAKLITQRKFDNLTKAERGGLSELDKAGFIKRQLVETRQITKHVAQILDSRMNTKYDENDKLIREVKVITLKSKLVSDFRKDFQFYKVREINNYHHAHDAYLNAVVGTALIKKYPKLESEFVYGDYKVYDVRKMIAKSEQEIGKATAKYFFYSNIMNFFKTEITLANGEIRKRPLIETNGETGEIVWDKGRDFATVRKVLSMPQVNIVKKTEVQTGGFSKESILPKRNSDKLIARKKDWDPKKYGGFDSPTVAYSVLVVAKVEKGKSKKLKSVKELLGITIMERSSFEKNPIDFLEAKGYKEVKKDLIIKLPKYSLFELENGRKRMLASAGELQKGNELALPSKYVNFLYLASHYEKLKGSPEDNEQKQLFVEQHKHYLDEIIEQISEFSKRVILADANLDKVLSAYNKHRDKPIREQAENIIHLFTLTNLGAPAAFKYFDTTIDRKRYTSTKEVLDATLIHQSITGLYETRIDLSQLGGDSGGSSGGSSGSETPGTSESATPESSGGSSGGSSRWEHRFELKPGRWVFVPTEEAREQGKEIKKQVEKRWKPPAYYYHLRQGGHVAALRCHLDNPWFAHVDLEDFFGQINRSRVTRALKGFFSSEEAWEMACESTVRRPPDSEFMLPYGFVQSPILASLALDKSPLGRYLRQLNKNDGLTVSVYMDDIVISGDDEEMLEQAFDELKQAAEKSGFPLNEEKTQGPASQITAFNIELSHNSMEITEERMAEFQEAYRQGNEHQKEGILGYVGSVNPAQSGGSKRTADGSEFEPKKKRKV

SEQ ID NO: 1511 - protein, 1682 aa, synthetic construct
MKRTADGSEFESPKKKRKVDKKYSIGLDIGTNSVGWAVITDEYKVPSKKFKVLGNTDRHSIKKNLIGALLFDSGETAEATRLKRTARRRYTRRKNRICYLQEIFSNEMAKVDDSFFHRLEESFLVEEDKKHERHPIFGNIVDEVAYHEKYPTIYHLRKKLVDSTDKADLRLIYLALAHMIKFRGHFLIEGDLNPDNSDVDKLFIQLVQTYNQLFEENPINASGVDAKAILSARLSKSRRLENLIAQLPGEKKNGLFGNLIALSLGLTPNFKSNFDLAEDAKLQLSKDTYDDDLDNLLAQIGDQYADLFLAAKNLSDAILLSDILRVNTEITKAPLSASMIKRYDEHHQDLTLLKALVRQQLPEKYKEIFFDQSKNGYAGYIDGGASQEEFYKFIKPILEKMDGTEELLVKLNREDLLRKQRTFDNGSIPHQIHLGELHAILRRQEDFYPFLKDNREKIEKILTFRIPYYVGPLARGNSRFAWMTRKSEETITPWNFEEVVDKGASAQSFIERMTNFDKNLPNEKVLPKHSLLYEYFTVYNELTKVKYVTEGMRKPAFLSGEQKKAIVDLLFKTNRKVTVKQLKEDYFKKIECFDSVEISGVEDRFNASLGTYHDLLKIIKDKDFLDNEENEDILEDIVLTLTLFEDREMIEERLKTYAHLFDDKVMKQLKRRRYTGWGRLSRKLINGIRDKQSGKTILDFLKSDGFANRNFMQLIHDDSLTFKEDIQKAQVSGQGDSLHEHIANLAGSPAIKKGILQTVKVVDELVKVMGRHKPENIVIEMARENQTTQKGQKNSRERMKRIEEGIKELGSQILKEHPVENTQLQNEKLYLYYLQNGRDMYVDQELDINRLSDYDVDAIVPQSFLKDDSIDNKVLTRSDKNRGKSDNVPSEEVVKKMKNYWRQLLNAKLITQRKFDNLTKAERGGLSELDKAGFIKRQLVETRQITKHVAQILDSRMNTKYDENDKLIREVKVITLKSKLVSDFRKDFQFYKVREINNYHHAHDAYLNAVVGTALIKKYPKLESEFVYGDYKVYDVRKMIAKSEQEIGKATAKYFFYSNIMNFFKTEITLANGEIRKRPLIETNGETGEIVWDKGRDFATVRKVLSMPQVNIVKKTEVQTGGFSKESILPKRNSDKLIARKKDWDPKKYGGFDSPTVAYSVLVVAKVEKGKSKKLKSVKELLGITIMERSSFEKNPIDFLEAKGYKEVKKDLIIKLPKYSLFELENGRKRMLASAGELQKGNELALPSKYVNFLYLASHYEKLKGSPEDNEQKQLFVEQHKHYLDEIIEQISEFSKRVILADANLDKVLSAYNKHRDKPIREQAENIIHLFTLTNLGAPAAFKYFDTTIDRKRYTSTKEVLDATLIHQSITGLYETRIDLSQLGGDSGGSSGGSSGSETPGTSESATPESSGGSSGGSSRWEHRFELKPGRWVFVPTEEAREQGKEIKKQVEKRWKPPAYYYHLRQGGHVAALRCHLDHPWFAHVDLEDFFGQINRSRVTEALKGFKSYEEAWEMACESTVRRPPDSEFMLPYGFVQSPILASLALDKSALGRYLRQLNKNDGLTVSVYMDDIVISGDDEEMLEQAFDELKQAAEKSGFPLNEEKTQGPASQITAFNIELSHNSMEITEERMAEFQEAYRQGNEHNKEGILGYVGSVNPAQSGGSKRTADGSEFEPKKKRKV

SEQ ID NO: 1512 - protein, 1682 aa, synthetic construct
MKRTADGSEFESPKKKRKVDKKYSIGLDIGTNSVGWAVITDEYKVPSKKFKVLGNTDRHSIKKNLIGALLFDSGETAEATRLKRTARRRYTRRKNRICYLQEIFSNEMAKVDDSFFHRLEESFLVEEDKKHERHPIFGNIVDEVAYHEKYPTIYHLRKKLVDSTDKADLRLIYLALAHMIKFRGHFLIEGDLNPDNSDVDKLFIQLVQTYNQLFEENPINASGVDAKAILSARLSKSRRLENLIAQLPGEKKNGLFGNLIALSLGLTPNFKSNFDLAEDAKLQLSKDTYDDDLDNLLAQIGDQYADLFLAAKNLSDAILLSDILRVNTEITKAPLSASMIKRYDEHHQDLTLLKALVRQQLPEKYKEIFFDQSKNGYAGYIDGGASQEEFYKFIKPILEKMDGTEELLVKLNREDLLRKQRTFDNGSIPHQIHLGELHAILRRQEDFYPFLKDNREKIEKILTFRIPYYVGPLARGNSRFAWMTRKSEETITPWNFEEVVDKGASAQSFIERMTNFDKNLPNEKVLPKHSLLYEYFTVYNELTKVKYVTEGMRKPAFLSGEQKKAIVDLLFKTNRKVTVKQLKEDYFKKIECFDSVEISGVEDRFNASLGTYHDLLKIIKDKDFLDNEENEDILEDIVLTLTLFEDREMIEERLKTYAHLFDDKVMKQLKRRRYTGWGRLSRKLINGIRDKQSGKTILDFLKSDGFANRNFMQLIHDDSLTFKEDIQKAQVSGQGDSLHEHIANLAGSPAIKKGILQTVKVVDELVKVMGRHKPENIVIEMARENQTTQKGQKNSRERMKRIEEGIKELGSQILKEHPVENTQLQNEKLYLYYLQNGRDMYVDQELDINRLSDYDVDAIVPQSFLKDDSIDNKVLTRSDKNRGKSDNVPSEEVVKKMKNYWRQLLNAKLITQRKFDNLTKAERGGLSELDKAGFIKRQLVETRQITKHVAQILDSRMNTKYDENDKLIREVKVITLKSKLVSDFRKDFQFYKVREINNYHHAHDAYLNAVVGTALIKKYPKLESEFVYGDYKVYDVRKMIAKSEQEIGKATAKYFFYSNIMNFFKTEITLANGEIRKRPLIETNGETGEIVWDKGRDFATVRKVLSMPQVNIVKKTEVQTGGFSKESILPKRNSDKLIARKKDWDPKKYGGFDSPTVAYSVLVVAKVEKGKSKKLKSVKELLGITIMERSSFEKNPIDFLEAKGYKEVKKDLIIKLPKYSLFELENGRKRMLASAGELQKGNELALPSKYVNFLYLASHYEKLKGSPEDNEQKQLFVEQHKHYLDEIIEQISEFSKRVILADANLDKVLSAYNKHRDKPIREQAENIIHLFTLTNLGAPAAFKYFDTTIDRKRYTSTKEVLDATLIHQSITGLYETRIDLSQLGGDSGGSSGGSSGSETPGTSESATPESSGGSSGGSSRWEHRFELKPGRWVFVPTEEAREQGKEIKKQVEKRWKPPAYYYHLRQGGHVAALRCHLDNPWFAHVDLEDFFGQINRSRVTRALKGFFGYEEAWEMACESTVRRPPDSEFMLPYGFVQSPIMASLALDKSALGRYLRQLNKNDGLTVSVYMDDIVISGDDEEMLEQAFDELKQAAEKSGFPLNEEKTQGPASQITAFNIELSHNSMEITEERMAEFQEAYRQGNEHQKEGILGYVGSVNPAQSGGSKRTADGSEFEPKKKRKV

SEQ ID NO: 1513 - protein, 1682 aa, synthetic construct
MKRTADGSEFESPKKKRKVDKKYSIGLDIGTNSVGWAVITDEYKVPSKKFKVLGNTDRHSIKKNLIGALLFDSGETAEATRLKRTARRRYTRRKNRICYLQEIFSNEMAKVDDSFFHRLEESFLVEEDKKHERHPIFGNIVDEVAYHEKYPTIYHLRKKLVDSTDKADLRLIYLALAHMIKFRGHFLIEGDLNPDNSDVDKLFIQLVQTYNQLFEENPINASGVDAKAILSARLSKSRRLENLIAQLPGEKKNGLFGNLIALSLGLTPNFKSNFDLAEDAKLQLSKDTYDDDLDNLLAQIGDQYADLFLAAKNLSDAILLSDILRVNTEITKAPLSASMIKRYDEHHQDLTLLKALVRQQLPEKYKEIFFDQSKNGYAGYIDGGASQEEFYKFIKPILEKMDGTEELLVKLNREDLLRKQRTFDNGSIPHQIHLGELHAILRRQEDFYPFLKDNREKIEKILTFRIPYYVGPLARGNSRFAWMTRKSEETITPWNFEEVVDKGASAQSFIERMTNFDKNLPNEKVLPKHSLLYEYFTVYNELTKVKYVTEGMRKPAFLSGEQKKAIVDLLFKTNRKVTVKQLKEDYFKKIECFDSVEISGVEDRFNASLGTYHDLLKIIKDKDFLDNEENEDILEDIVLTLTLFEDREMIEERLKTYAHLFDDKVMKQLKRRRYTGWGRLSRKLINGIRDKQSGKTILDFLKSDGFANRNFMQLIHDDSLTFKEDIQKAQVSGQGDSLHEHIANLAGSPAIKKGILQTVKVVDELVKVMGRHKPENIVIEMARENQTTQKGQKNSRERMKRIEEGIKELGSQILKEHPVENTQLQNEKLYLYYLQNGRDMYVDQELDINRLSDYDVDAIVPQSFLKDDSIDNKVLTRSDKNRGKSDNVPSEEVVKKMKNYWRQLLNAKLITQRKFDNLTKAERGGLSELDKAGFIKRQLVETRQITKHVAQILDSRMNTKYDENDKLIREVKVITLKSKLVSDFRKDFQFYKVREINNYHHAHDAYLNAVVGTALIKKYPKLESEFVYGDYKVYDVRKMIAKSEQEIGKATAKYFFYSNIMNFFKTEITLANGEIRKRPLIETNGETGEIVWDKGRDFATVRKVLSMPQVNIVKKTEVQTGGFSKESILPKRNSDKLIARKKDWDPKKYGGFDSPTVAYSVLVVAKVEKGKSKKLKSVKELLGITIMERSSFEKNPIDFLEAKGYKEVKKDLIIKLPKYSLFELENGRKRMLASAGELQKGNELALPSKYVNFLYLASHYEKLKGSPEDNEQKQLFVEQHKHYLDEIIEQISEFSKRVILADANLDKVLSAYNKHRDKPIREQAENIIHLFTLTNLGAPAAFKYFDTTIDRKRYTSTKEVLDATLIHQSITGLYETRIDLSQLGGDSGGSSGGSSGSETPGTSESATPESSGGSSGGSSRWEHRFELKPGRWVFVPTEEAREQGKEIKKQVEKRWKPPAYYYHLRQGGHVAALRCHLDNPWFAHVDLEDFFGQINRSRVTRALKGFFSYEEAWEMACESTVRRPPDSEFMLPYGFVQSPILASLAMDKSPLGRYLRQLNKNDGLTVSVYMDDIVISGDDEEMLEQAFDELKQAAEKSGFPLNEEKTQGPASQITAFNIELSHNSMEITEERMAEFQEAYRQGNEHQKEGILGYVGSVNPAQSGGSKRTADGSEFEPKKKRKV

SEQ ID NO: 1514 - protein, 1682 aa, synthetic construct
MKRTADGSEFESPKKKRKVDKKYSIGLDIGTNSVGWAVITDEYKVPSKKFKVLGNTDRHSIKKNLIGALLFDSGETAEATRLKRTARRRYTRRKNRICYLQEIFSNEMAKVDDSFFHRLEESFLVEEDKKHERHPIFGNIVDEVAYHEKYPTIYHLRKKLVDSTDKADLRLIYLALAHMIKFRGHFLIEGDLNPDNSDVDKLFIQLVQTYNQLFEENPINASGVDAKAILSARLSKSRRLENLIAQLPGEKKNGLFGNLIALSLGLTPNFKSNFDLAEDAKLQLSKDTYDDDLDNLLAQIGDQYADLFLAAKNLSDAILLSDILRVNTEITKAPLSASMIKRYDEHHQDLTLLKALVRQQLPEKYKEIFFDQSKNGYAGYIDGGASQEEFYKFIKPILEKMDGTEELLVKLNREDLLRKQRTFDNGSIPHQIHLGELHAILRRQEDFYPFLKDNREKIEKILTFRIPYYVGPLARGNSRFAWMTRKSEETITPWNFEEVVDKGASAQSFIERMTNFDKNLPNEKVLPKHSLLYEYFTVYNELTKVKYVTEGMRKPAFLSGEQKKAIVDLLFKTNRKVTVKQLKEDYFKKIECFDSVEISGVEDRFNASLGTYHDLLKIIKDKDFLDNEENEDILEDIVLTLTLFEDREMIEERLKTYAHLFDDKVMKQLKRRRYTGWGRLSRKLINGIRDKQSGKTILDFLKSDGFANRNFMQLIHDDSLTFKEDIQKAQVSGQGDSLHEHIANLAGSPAIKKGILQTVKVVDELVKVMGRHKPENIVIEMARENQTTQKGQKNSRERMKRIEEGIKELGSQILKEHPVENTQLQNEKLYLYYLQNGRDMYVDQELDINRLSDYDVDAIVPQSFLKDDSIDNKVLTRSDKNRGKSDNVPSEEVVKKMKNYWRQLLNAKLITQRKFDNLTKAERGGLSELDKAGFIKRQLVETRQITKHVAQILDSRMNTKYDENDKLIREVKVITLKSKLVSDFRKDFQFYKVREINNYHHAHDAYLNAVVGTALIKKYPKLESEFVYGDYKVYDVRKMIAKSEQEIGKATAKYFFYSNIMNFFKTEITLANGEIRKRPLIETNGETGEIVWDKGRDFATVRKVLSMPQVNIVKKTEVQTGGFSKESILPKRNSDKLIARKKDWDPKKYGGFDSPTVAYSVLVVAKVEKGKSKKLKSVKELLGITIMERSSFEKNPIDFLEAKGYKEVKKDLIIKLPKYSLFELENGRKRMLASAGELQKGNELALPSKYVNFLYLASHYEKLKGSPEDNEQKQLFVEQHKHYLDEIIEQISEFSKRVILADANLDKVLSAYNKHRDKPIREQAENIIHLFTLTNLGAPAAFKYFDTTIDRKRYTSTKEVLDATLIHQSITGLYETRIDLSQLGGDSGGSSGGSSGSETPGTSESATPESSGGSSGGSSRWEHRFELKPGRWVFVPTEEAREQGKEIKKQVEKRWKWPAYYYHLRQGGHVAALRCHLDNPWFAHVDLEDFFGQINRSRVTRALKGFFSYEEAWEMACESTVRRPPDSEFMLPYGFVQSPILASLALDKSALGRYLRQLNKNPGLTVSVYMDDIVISGDDEEMLEFAFDELKQAAEKSGFPLQEEKTQGPASQITAFNIELSHNSMEITEERMAEFQEAYRQGNEHQKEGILGYVGSVNPAQSGGSKRTADGSEFEPKKKRKV

SEQ ID NO: 1515 - protein, 1682 aa, synthetic construct
MKRTADGSEFESPKKKRKVDKKYSIGLDIGTNSVGWAVITDEYKVPSKKFKVLGNTDRHSIKKNLIGALLFDSGETAEATRLKRTARRRYTRRKNRICYLQEIFSNEMAKVDDSFFHRLEESFLVEEDKKHERHPIFGNIVDEVAYHEKYPTIYHLRKKLVDSTDKADLRLIYLALAHMIKFRGHFLIEGDLNPDNSDVDKLFIQLVQTYNQLFEENPINASGVDAKAILSARLSKSRRLENLIAQLPGEKKNGLFGNLIALSLGLTPNFKSNFDLAEDAKLQLSKDTYDDDLDNLLAQIGDQYADLFLAAKNLSDAILLSDILRVNTEITKAPLSASMIKRYDEHHQDLTLLKALVRQQLPEKYKEIFFDQSKNGYAGYIDGGASQEEFYKFIKPILEKMDGTEELLVKLNREDLLRKQRTFDNGSIPHQIHLGELHAILRRQEDFYPFLKDNREKIEKILTFRIPYYVGPLARGNSRFAWMTRKSEETITPWNFEEVVDKGASAQSFIERMTNFDKNLPNEKVLPKHSLLYEYFTVYNELTKVKYVTEGMRKPAFLSGEQKKAIVDLLFKTNRKVTVKQLKEDYFKKIECFDSVEISGVEDRFNASLGTYHDLLKIIKDKDFLDNEENEDILEDIVLTLTLFEDREMIEERLKTYAHLFDDKVMKQLKRRRYTGWGRLSRKLINGIRDKQSGKTILDFLKSDGFANRNFMQLIHDDSLTFKEDIQKAQVSGQGDSLHEHIANLAGSPAIKKGILQTVKVVDELVKVMGRHKPENIVIEMARENQTTQKGQKNSRERMKRIEEGIKELGSQILKEHPVENTQLQNEKLYLYYLQNGRDMYVDQELDINRLSDYDVDAIVPQSFLKDDSIDNKVLTRSDKNRGKSDNVPSEEVVKKMKNYWRQLLNAKLITQRKFDNLTKAERGGLSELDKAGFIKRQLVETRQITKHVAQILDSRMNTKYDENDKLIREVKVITLKSKLVSDFRKDFQFYKVREINNYHHAHDAYLNAVVGTALIKKYPKLESEFVYGDYKVYDVRKMIAKSEQEIGKATAKYFFYSNIMNFFKTEITLANGEIRKRPLIETNGETGEIVWDKGRDFATVRKVLSMPQVNIVKKTEVQTGGFSKESILPKRNSDKLIARKKDWDPKKYGGFDSPTVAYSVLVVAKVEKGKSKKLKSVKELLGITIMERSSFEKNPIDFLEAKGYKEVKKDLIIKLPKYSLFELENGRKRMLASAGELQKGNELALPSKYVNFLYLASHYEKLKGSPEDNEQKQLFVEQHKHYLDEIIEQISEFSKRVILADANLDKVLSAYNKHRDKPIREQAENIIHLFTLTNLGAPAAFKYFDTTIDRKRYTSTKEVLDATLIHQSITGLYETRIDLSQLGGDSGGSSGGSSGSETPGTSESATPESSGGSSGGSSRWEHRFELKPGRWVFVPTEEAREQGKEIKKQVEKRWKPPAYYYHLRQGGHVAALRCHLDNPWFAHVDLEDFFGQINRSRVTRALKGFFSSEEAWEMACESTVRRPPDSEFMLPYGFVQSPILASLAMDKSALGRYLRQLNKNDGLTVSVYMDDIVISGDDEEMLEQAFDELKQAAEKSGFPLNEEKTQGPASQITAFNIELSHNSMEITEERMAEFQEAYRQGNEHQKEGILGYVGSVNPAQSGGSKRTADGSEFEPKKKRKV

SEQ ID NO: 1516 - protein, 1682 aa, synthetic construct
MKRTADGSEFESPKKKRKVDKKYSIGLDIGTNSVGWAVITDEYKVPSKKFKVLGNTDRHSIKKNLIGALLFDSGETAEATRLKRTARRRYTRRKNRICYLQEIFSNEMAKVDDSFFHRLEESFLVEEDKKHERHPIFGNIVDEVAYHEKYPTIYHLRKKLVDSTDKADLRLIYLALAHMIKFRGHFLIEGDLNPDNSDVDKLFIQLVQTYNQLFEENPINASGVDAKAILSARLSKSRRLENLIAQLPGEKKNGLFGNLIALSLGLTPNFKSNFDLAEDAKLQLSKDTYDDDLDNLLAQIGDQYADLFLAAKNLSDAILLSDILRVNTEITKAPLSASMIKRYDEHHQDLTLLKALVRQQLPEKYKEIFFDQSKNGYAGYIDGGASQEEFYKFIKPILEKMDGTEELLVKLNREDLLRKQRTFDNGSIPHQIHLGELHAILRRQEDFYPFLKDNREKIEKILTFRIPYYVGPLARGNSRFAWMTRKSEETITPWNFEEVVDKGASAQSFIERMTNFDKNLPNEKVLPKHSLLYEYFTVYNELTKVKYVTEGMRKPAFLSGEQKKAIVDLLFKTNRKVTVKQLKEDYFKKIECFDSVEISGVEDRFNASLGTYHDLLKIIKDKDFLDNEENEDILEDIVLTLTLFEDREMIEERLKTYAHLFDDKVMKQLKRRRYTGWGRLSRKLINGIRDKQSGKTILDFLKSDGFANRNFMQLIHDDSLTFKEDIQKAQVSGQGDSLHEHIANLAGSPAIKKGILQTVKVVDELVKVMGRHKPENIVIEMARENQTTQKGQKNSRERMKRIEEGIKELGSQILKEHPVENTQLQNEKLYLYYLQNGRDMYVDQELDINRLSDYDVDAIVPQSFLKDDSIDNKVLTRSDKNRGKSDNVPSEEVVKKMKNYWRQLLNAKLITQRKFDNLTKAERGGLSELDKAGFIKRQLVETRQITKHVAQILDSRMNTKYDENDKLIREVKVITLKSKLVSDFRKDFQFYKVREINNYHHAHDAYLNAVVGTALIKKYPKLESEFVYGDYKVYDVRKMIAKSEQEIGKATAKYFFYSNIMNFFKTEITLANGEIRKRPLIETNGETGEIVWDKGRDFATVRKVLSMPQVNIVKKTEVQTGGFSKESILPKRNSDKLIARKKDWDPKKYGGFDSPTVAYSVLVVAKVEKGKSKKLKSVKELLGITIMERSSFEKNPIDFLEAKGYKEVKKDLIIKLPKYSLFELENGRKRMLASAGELQKGNELALPSKYVNFLYLASHYEKLKGSPEDNEQKQLFVEQHKHYLDEIIEQISEFSKRVILADANLDKVLSAYNKHRDKPIREQAENIIHLFTLTNLGAPAAFKYFDTTIDRKRYTSTKEVLDATLIHQSITGLYETRIDLSQLGGDSGGSSGGSSGSETPGTSESATPESSGGSSGGSSRWEHRFELKPGRWVFVPTEEAREQGKEIKKQVEKRWKPPAYYYHLRQGGHVAALRCHLDNPWFAHVDLEDFFGQINRSRVTRALKGFFSREEAWEMACESTVRRPPDSEFMLPYGFVQSPILASLAMDKSALGRYLRQLNKNDGLTVSVYMDDIVISGDDEEMLEQAFDELKQAAEKSGFPLNEEKTQGPASQITAFNIELSHNSMEITEERMAEFQEAYRQGNEHQKEGILGYVGSVNPAQSGGSKRTADGSEFEPKKKRKV

SEQ ID NO: 1517 - protein, 1682 aa, synthetic construct
MKRTADGSEFESPKKKRKVDKKYSIGLDIGTNSVGWAVITDEYKVPSKKFKVLGNTDRHSIKKNLIGALLFDSGETAEATRLKRTARRRYTRRKNRICYLQEIFSNEMAKVDDSFFHRLEESFLVEEDKKHERHPIFGNIVDEVAYHEKYPTIYHLRKKLVDSTDKADLRLIYLALAHMIKFRGHFLIEGDLNPDNSDVDKLFIQLVQTYNQLFEENPINASGVDAKAILSARLSKSRRLENLIAQLPGEKKNGLFGNLIALSLGLTPNFKSNFDLAEDAKLQLSKDTYDDDLDNLLAQIGDQYADLFLAAKNLSDAILLSDILRVNTEITKAPLSASMIKRYDEHHQDLTLLKALVRQQLPEKYKEIFFDQSKNGYAGYIDGGASQEEFYKFIKPILEKMDGTEELLVKLNREDLLRKQRTFDNGSIPHQIHLGELHAILRRQEDFYPFLKDNREKIEKILTFRIPYYVGPLARGNSRFAWMTRKSEETITPWNFEEVVDKGASAQSFIERMTNFDKNLPNEKVLPKHSLLYEYFTVYNELTKVKYVTEGMRKPAFLSGEQKKAIVDLLFKTNRKVTVKQLKEDYFKKIECFDSVEISGVEDRFNASLGTYHDLLKIIKDKDFLDNEENEDILEDIVLTLTLFEDREMIEERLKTYAHLFDDKVMKQLKRRRYTGWGRLSRKLINGIRDKQSGKTILDFLKSDGFANRNFMQLIHDDSLTFKEDIQKAQVSGQGDSLHEHIANLAGSPAIKKGILQTVKVVDELVKVMGRHKPENIVIEMARENQTTQKGQKNSRERMKRIEEGIKELGSQILKEHPVENTQLQNEKLYLYYLQNGRDMYVDQELDINRLSDYDVDAIVPQSFLKDDSIDNKVLTRSDKNRGKSDNVPSEEVVKKMKNYWRQLLNAKLITQRKFDNLTKAERGGLSELDKAGFIKRQLVETRQITKHVAQILDSRMNTKYDENDKLIREVKVITLKSKLVSDFRKDFQFYKVREINNYHHAHDAYLNAVVGTALIKKYPKLESEFVYGDYKVYDVRKMIAKSEQEIGKATAKYFFYSNIMNFFKTEITLANGEIRKRPLIETNGETGEIVWDKGRDFATVRKVLSMPQVNIVKKTEVQTGGFSKESILPKRNSDKLIARKKDWDPKKYGGFDSPTVAYSVLVVAKVEKGKSKKLKSVKELLGITIMERSSFEKNPIDFLEAKGYKEVKKDLIIKLPKYSLFELENGRKRMLASAGELQKGNELALPSKYVNFLYLASHYEKLKGSPEDNEQKQLFVEQHKHYLDEIIEQISEFSKRVILADANLDKVLSAYNKHRDKPIREQAENIIHLFTLTNLGAPAAFKYFDTTIDRKRYTSTKEVLDATLIHQSITGLYETRIDLSQLGGDSGGSSGGSSGSETPGTSESATPESSGGSSGGSSRWEHRFELKPGRWVFVPTEEAREQGKEIKKQVEKRWKPPAYYYHLRQGGHVAALRCHLDNPWFAHVDLEDFFGQINRSRVTRALKGFFSNEEAWEMACESTVRRPPDSEFMLPYGFVQSPILASLAMDKSALGRYLRQLNKNDGLTVSVYMDDIVISGDDEEMLEQAFDELKQAAEKSGFPLNEEKTQGPASQITAFNIELSHNSMEITEERMAEFQEAYRQGNEHQKEGILGYVGSVNPAQSGGSKRTADGSEFEPKKKRKV

SEQ ID NO: 1518 - protein, 1682 aa, synthetic construct
MKRTADGSEFESPKKKRKVDKKYSIGLDIGTNSVGWAVITDEYKVPSKKFKVLGNTDRHSIKKNLIGALLFDSGETAEATRLKRTARRRYTRRKNRICYLQEIFSNEMAKVDDSFFHRLEESFLVEEDKKHERHPIFGNIVDEVAYHEKYPTIYHLRKKLVDSTDKADLRLIYLALAHMIKFRGHFLIEGDLNPDNSDVDKLFIQLVQTYNQLFEENPINASGVDAKAILSARLSKSRRLENLIAQLPGEKKNGLFGNLIALSLGLTPNFKSNFDLAEDAKLQLSKDTYDDDLDNLLAQIGDQYADLFLAAKNLSDAILLSDILRVNTEITKAPLSASMIKRYDEHHQDLTLLKALVRQQLPEKYKEIFFDQSKNGYAGYIDGGASQEEFYKFIKPILEKMDGTEELLVKLNREDLLRKQRTFDNGSIPHQIHLGELHAILRRQEDFYPFLKDNREKIEKILTFRIPYYVGPLARGNSRFAWMTRKSEETITPWNFEEVVDKGASAQSFIERMTNFDKNLPNEKVLPKHSLLYEYFTVYNELTKVKYVTEGMRKPAFLSGEQKKAIVDLLFKTNRKVTVKQLKEDYFKKIECFDSVEISGVEDRFNASLGTYHDLLKIIKDKDFLDNEENEDILEDIVLTLTLFEDREMIEERLKTYAHLFDDKVMKQLKRRRYTGWGRLSRKLINGIRDKQSGKTILDFLKSDGFANRNFMQLIHDDSLTFKEDIQKAQVSGQGDSLHEHIANLAGSPAIKKGILQTVKVVDELVKVMGRHKPENIVIEMARENQTTQKGQKNSRERMKRIEEGIKELGSQILKEHPVENTQLQNEKLYLYYLQNGRDMYVDQELDINRLSDYDVDAIVPQSFLKDDSIDNKVLTRSDKNRGKSDNVPSEEVVKKMKNYWRQLLNAKLITQRKFDNLTKAERGGLSELDKAGFIKRQLVETRQITKHVAQILDSRMNTKYDENDKLIREVKVITLKSKLVSDFRKDFQFYKVREINNYHHAHDAYLNAVVGTALIKKYPKLESEFVYGDYKVYDVRKMIAKSEQEIGKATAKYFFYSNIMNFFKTEITLANGEIRKRPLIETNGETGEIVWDKGRDFATVRKVLSMPQVNIVKKTEVQTGGFSKESILPKRNSDKLIARKKDWDPKKYGGFDSPTVAYSVLVVAKVEKGKSKKLKSVKELLGITIMERSSFEKNPIDFLEAKGYKEVKKDLIIKLPKYSLFELENGRKRMLASAGELQKGNELALPSKYVNFLYLASHYEKLKGSPEDNEQKQLFVEQHKHYLDEIIEQISEFSKRVILADANLDKVLSAYNKHRDKPIREQAENIIHLFTLTNLGAPAAFKYFDTTIDRKRYTSTKEVLDATLIHQSITGLYETRIDLSQLGGDSGGSSGGSSGSETPGTSESATPESSGGSSGGSSRWEHRFELKPGRWVFVPTEEAREQGKEIKKQVEKRWKPPAYYYHLRQGGHVAALRCHLDNPWFAHVDLEDFFGQINRSRVTRALKGFFGSEEAWEMACESTVRRPPDSEFMLPYGFVQSPILASLALDKSALGRYLRQLNKNDGLTVSVYMDDIVISGDDEEMLEQAFDELKQAAEKSGFPLNEEKTQGPASQITAFNIELSHNSMEITEERMAEFQEAYRQGNEHQKEGILGYVGSVNPAQSGGSKRTADGSEFEPKKKRKV

SEQ ID NO: 1519 - protein, 1682 aa, synthetic construct
MKRTADGSEFESPKKKRKVDKKYSIGLDIGTNSVGWAVITDEYKVPSKKFKVLGNTDRHSIKKNLIGALLFDSGETAEATRLKRTARRRYTRRKNRICYLQEIFSNEMAKVDDSFFHRLEESFLVEEDKKHERHPIFGNIVDEVAYHEKYPTIYHLRKKLVDSTDKADLRLIYLALAHMIKFRGHFLIEGDLNPDNSDVDKLFIQLVQTYNQLFEENPINASGVDAKAILSARLSKSRRLENLIAQLPGEKKNGLFGNLIALSLGLTPNFKSNFDLAEDAKLQLSKDTYDDDLDNLLAQIGDQYADLFLAAKNLSDAILLSDILRVNTEITKAPLSASMIKRYDEHHQDLTLLKALVRQQLPEKYKEIFFDQSKNGYAGYIDGGASQEEFYKFIKPILEKMDGTEELLVKLNREDLLRKQRTFDNGSIPHQIHLGELHAILRRQEDFYPFLKDNREKIEKILTFRIPYYVGPLARGNSRFAWMTRKSEETITPWNFEEVVDKGASAQSFIERMTNFDKNLPNEKVLPKHSLLYEYFTVYNELTKVKYVTEGMRKPAFLSGEQKKAIVDLLFKTNRKVTVKQLKEDYFKKIECFDSVEISGVEDRFNASLGTYHDLLKIIKDKDFLDNEENEDILEDIVLTLTLFEDREMIEERLKTYAHLFDDKVMKQLKRRRYTGWGRLSRKLINGIRDKQSGKTILDFLKSDGFANRNFMQLIHDDSLTFKEDIQKAQVSGQGDSLHEHIANLAGSPAIKKGILQTVKVVDELVKVMGRHKPENIVIEMARENQTTQKGQKNSRERMKRIEEGIKELGSQILKEHPVENTQLQNEKLYLYYLQNGRDMYVDQELDINRLSDYDVDAIVPQSFLKDDSIDNKVLTRSDKNRGKSDNVPSEEVVKKMKNYWRQLLNAKLITQRKFDNLTKAERGGLSELDKAGFIKRQLVETRQITKHVAQILDSRMNTKYDENDKLIREVKVITLKSKLVSDFRKDFQFYKVREINNYHHAHDAYLNAVVGTALIKKYPKLESEFVYGDYKVYDVRKMIAKSEQEIGKATAKYFFYSNIMNFFKTEITLANGEIRKRPLIETNGETGEIVWDKGRDFATVRKVLSMPQVNIVKKTEVQTGGFSKESILPKRNSDKLIARKKDWDPKKYGGFDSPTVAYSVLVVAKVEKGKSKKLKSVKELLGITIMERSSFEKNPIDFLEAKGYKEVKKDLIIKLPKYSLFELENGRKRMLASAGELQKGNELALPSKYVNFLYLASHYEKLKGSPEDNEQKQLFVEQHKHYLDEIIEQISEFSKRVILADANLDKVLSAYNKHRDKPIREQAENIIHLFTLTNLGAPAAFKYFDTTIDRKRYTSTKEVLDATLIHQSITGLYETRIDLSQLGGDSGGSSGGSSGSETPGTSESATPESSGGSSGGSSRWEHRFELKPGRWVFVPTEEAREQGKEIKKQVEKRWKPPAYYYHLRQGGHVAALRCHLDNPWFAHVDLEDFFGQINRSRVTRALKGFFGNEEAWEMACESTVRRPPDSEFMLPYGFVQSPILASLALDKSALGRYLRQLNKNDGLTVSVYMDDIVISGDDEEMLEQAFDELKQAAEKSGFPLNEEKTQGPASQITAFNIELSHNSMEITEERMAEFQEAYRQGNEHQKEGILGYVGSVNPAQSGGSKRTADGSEFEPKKKRKV

SEQ ID NO: 1520 - protein, 1682 aa, synthetic construct
MKRTADGSEFESPKKKRKVDKKYSIGLDIGTNSVGWAVITDEYKVPSKKFKVLGNTDRHSIKKNLIGALLFDSGETAEATRLKRTARRRYTRRKNRICYLQEIFSNEMAKVDDSFFHRLEESFLVEEDKKHERHPIFGNIVDEVAYHEKYPTIYHLRKKLVDSTDKADLRLIYLALAHMIKFRGHFLIEGDLNPDNSDVDKLFIQLVQTYNQLFEENPINASGVDAKAILSARLSKSRRLENLIAQLPGEKKNGLFGNLIALSLGLTPNFKSNFDLAEDAKLQLSKDTYDDDLDNLLAQIGDQYADLFLAAKNLSDAILLSDILRVNTEITKAPLSASMIKRYDEHHQDLTLLKALVRQQLPEKYKEIFFDQSKNGYAGYIDGGASQEEFYKFIKPILEKMDGTEELLVKLNREDLLRKQRTFDNGSIPHQIHLGELHAILRRQEDFYPFLKDNREKIEKILTFRIPYYVGPLARGNSRFAWMTRKSEETITPWNFEEVVDKGASAQSFIERMTNFDKNLPNEKVLPKHSLLYEYFTVYNELTKVKYVTEGMRKPAFLSGEQKKAIVDLLFKTNRKVTVKQLKEDYFKKIECFDSVEISGVEDRFNASLGTYHDLLKIIKDKDFLDNEENEDILEDIVLTLTLFEDREMIEERLKTYAHLFDDKVMKQLKRRRYTGWGRLSRKLINGIRDKQSGKTILDFLKSDGFANRNFMQLIHDDSLTFKEDIQKAQVSGQGDSLHEHIANLAGSPAIKKGILQTVKVVDELVKVMGRHKPENIVIEMARENQTTQKGQKNSRERMKRIEEGIKELGSQILKEHPVENTQLQNEKLYLYYLQNGRDMYVDQELDINRLSDYDVDAIVPQSFLKDDSIDNKVLTRSDKNRGKSDNVPSEEVVKKMKNYWRQLLNAKLITQRKFDNLTKAERGGLSELDKAGFIKRQLVETRQITKHVAQILDSRMNTKYDENDKLIREVKVITLKSKLVSDFRKDFQFYKVREINNYHHAHDAYLNAVVGTALIKKYPKLESEFVYGDYKVYDVRKMIAKSEQEIGKATAKYFFYSNIMNFFKTEITLANGEIRKRPLIETNGETGEIVWDKGRDFATVRKVLSMPQVNIVKKTEVQTGGFSKESILPKRNSDKLIARKKDWDPKKYGGFDSPTVAYSVLVVAKVEKGKSKKLKSVKELLGITIMERSSFEKNPIDFLEAKGYKEVKKDLIIKLPKYSLFELENGRKRMLASAGELQKGNELALPSKYVNFLYLASHYEKLKGSPEDNEQKQLFVEQHKHYLDEIIEQISEFSKRVILADANLDKVLSAYNKHRDKPIREQAENIIHLFTLTNLGAPAAFKYFDTTIDRKRYTSTKEVLDATLIHQSITGLYETRIDLSQLGGDSGGSSGGSSGSETPGTSESATPESSGGSSGGSSRWEHRFELKPGRWVFVPTEEAREQGKEIKKQVEKRWKPPAYYYHLRQGGHVAALRCHLDNPWFAKVDLEDFFGQINRSRVTRALKGFFGYEEAWEMACESTVRRPPDSEFMLPYGFVQSPILASLALDKSALGRYLRQLNKNDGLTVSVYMDDIVISGDDEEMLEQAFDELKQAAEKSGFPLNEEKTQGPASQITAFNIELSHNSMEITEERMAEFQEAYRQGNEHQKEGILGYVGSVNPAQSGGSKRTADGSEFEPKKKRKV

SEQ ID NO: 1521 - protein, 1682 aa, synthetic construct
MKRTADGSEFESPKKKRKVDKKYSIGLDIGTNSVGWAVITDEYKVPSKKFKVLGNTDRHSIKKNLIGALLFDSGETAEATRLKRTARRRYTRRKNRICYLQEIFSNEMAKVDDSFFHRLEESFLVEEDKKHERHPIFGNIVDEVAYHEKYPTIYHLRKKLVDSTDKADLRLIYLALAHMIKFRGHFLIEGDLNPDNSDVDKLFIQLVQTYNQLFEENPINASGVDAKAILSARLSKSRRLENLIAQLPGEKKNGLFGNLIALSLGLTPNFKSNFDLAEDAKLQLSKDTYDDDLDNLLAQIGDQYADLFLAAKNLSDAILLSDILRVNTEITKAPLSASMIKRYDEHHQDLTLLKALVRQQLPEKYKEIFFDQSKNGYAGYIDGGASQEEFYKFIKPILEKMDGTEELLVKLNREDLLRKQRTFDNGSIPHQIHLGELHAILRRQEDFYPFLKDNREKIEKILTFRIPYYVGPLARGNSRFAWMTRKSEETITPWNFEEVVDKGASAQSFIERMTNFDKNLPNEKVLPKHSLLYEYFTVYNELTKVKYVTEGMRKPAFLSGEQKKAIVDLLFKTNRKVTVKQLKEDYFKKIECFDSVEISGVEDRFNASLGTYHDLLKIIKDKDFLDNEENEDILEDIVLTLTLFEDREMIEERLKTYAHLFDDKVMKQLKRRRYTGWGRLSRKLINGIRDKQSGKTILDFLKSDGFANRNFMQLIHDDSLTFKEDIQKAQVSGQGDSLHEHIANLAGSPAIKKGILQTVKVVDELVKVMGRHKPENIVIEMARENQTTQKGQKNSRERMKRIEEGIKELGSQILKEHPVENTQLQNEKLYLYYLQNGRDMYVDQELDINRLSDYDVDAIVPQSFLKDDSIDNKVLTRSDKNRGKSDNVPSEEVVKKMKNYWRQLLNAKLITQRKFDNLTKAERGGLSELDKAGFIKRQLVETRQITKHVAQILDSRMNTKYDENDKLIREVKVITLKSKLVSDFRKDFQFYKVREINNYHHAHDAYLNAVVGTALIKKYPKLESEFVYGDYKVYDVRKMIAKSEQEIGKATAKYFFYSNIMNFFKTEITLANGEIRKRPLIETNGETGEIVWDKGRDFATVRKVLSMPQVNIVKKTEVQTGGFSKESILPKRNSDKLIARKKDWDPKKYGGFDSPTVAYSVLVVAKVEKGKSKKLKSVKELLGITIMERSSFEKNPIDFLEAKGYKEVKKDLIIKLPKYSLFELENGRKRMLASAGELQKGNELALPSKYVNFLYLASHYEKLKGSPEDNEQKQLFVEQHKHYLDEIIEQISEFSKRVILADANLDKVLSAYNKHRDKPIREQAENIIHLFTLTNLGAPAAFKYFDTTIDRKRYTSTKEVLDATLIHQSITGLYETRIDLSQLGGDSGGSSGGSSGSETPGTSESATPESSGGSSGGSSRWEHRFELKPGRWVFVPTEEAREQGKEIKKQVEKRWKPPAYYYHLRQGGHVAALRCHLDNQWFAHVDLEDFFGQINRSRVTRALKGFFSYEEAWEMSCESTVRRPPDSEFMLPYGFVQSPILASLALDKSALGRYLRQLNKNDGLTVSVYMDDIVISGDDEEMLEQAFDELYQAAEKSGFPLNEEKTQGPASQITAFNIELSHNSMEILEERMAEFQEAYRQGNEHQKEGILGYVGSVNPAQSGGSKRTADGSEFEPKKKRKV

SEQ ID NO: 1522 - protein, 1682 aa, synthetic construct
MKRTADGSEFESPKKKRKVDKKYSIGLDIGTNSVGWAVITDEYKVPSKKFKVLGNTDRHSIKKNLIGALLFDSGETAEATRLKRTARRRYTRRKNRICYLQEIFSNEMAKVDDSFFHRLEESFLVEEDKKHERHPIFGNIVDEVAYHEKYPTIYHLRKKLVDSTDKADLRLIYLALAHMIKFRGHFLIEGDLNPDNSDVDKLFIQLVQTYNQLFEENPINASGVDAKAILSARLSKSRRLENLIAQLPGEKKNGLFGNLIALSLGLTPNFKSNFDLAEDAKLQLSKDTYDDDLDNLLAQIGDQYADLFLAAKNLSDAILLSDILRVNTEITKAPLSASMIKRYDEHHQDLTLLKALVRQQLPEKYKEIFFDQSKNGYAGYIDGGASQEEFYKFIKPILEKMDGTEELLVKLNREDLLRKQRTFDNGSIPHQIHLGELHAILRRQEDFYPFLKDNREKIEKILTFRIPYYVGPLARGNSRFAWMTRKSEETITPWNFEEVVDKGASAQSFIERMTNFDKNLPNEKVLPKHSLLYEYFTVYNELTKVKYVTEGMRKPAFLSGEQKKAIVDLLFKTNRKVTVKQLKEDYFKKIECFDSVEISGVEDRFNASLGTYHDLLKIIKDKDFLDNEENEDILEDIVLTLTLFEDREMIEERLKTYAHLFDDKVMKQLKRRRYTGWGRLSRKLINGIRDKQSGKTILDFLKSDGFANRNFMQLIHDDSLTFKEDIQKAQVSGQGDSLHEHIANLAGSPAIKKGILQTVKVVDELVKVMGRHKPENIVIEMARENQTTQKGQKNSRERMKRIEEGIKELGSQILKEHPVENTQLQNEKLYLYYLQNGRDMYVDQELDINRLSDYDVDAIVPQSFLKDDSIDNKVLTRSDKNRGKSDNVPSEEVVKKMKNYWRQLLNAKLITQRKFDNLTKAERGGLSELDKAGFIKRQLVETRQITKHVAQILDSRMNTKYDENDKLIREVKVITLKSKLVSDFRKDFQFYKVREINNYHHAHDAYLNAVVGTALIKKYPKLESEFVYGDYKVYDVRKMIAKSEQEIGKATAKYFFYSNIMNFFKTEITLANGEIRKRPLIETNGETGEIVWDKGRDFATVRKVLSMPQVNIVKKTEVQTGGFSKESILPKRNSDKLIARKKDWDPKKYGGFDSPTVAYSVLVVAKVEKGKSKKLKSVKELLGITIMERSSFEKNPIDFLEAKGYKEVKKDLIIKLPKYSLFELENGRKRMLASAGELQKGNELALPSKYVNFLYLASHYEKLKGSPEDNEQKQLFVEQHKHYLDEIIEQISEFSKRVILADANLDKVLSAYNKHRDKPIREQAENIIHLFTLTNLGAPAAFKYFDTTIDRKRYTSTKEVLDATLIHQSITGLYETRIDLSQLGGDSGGSSGGSSGSETPGTSESATPESSGGSSGGSSRWEHRFELKPGRWVFVPTYEAREQGKEIKKQVEKRWKPPAYYYHLRQGGHVAALRCHLDNPWFAHVDLEDFFGQINRSRVTRALKGFFSYEEAWEMACESTVRRPPDSEFMLPYGFVQSPILASLALDNSALGRYLRQLQKNDGLTVSVYMDDIVISGDDEEMLEQAFDELKQAAEKSGFPLNEEKTQGPASQITAFNIELSHNSMEITEERMAEFQECYRQGNEHQKEGILGYVGSVNPAQSGGSKRTADGSEFEPKKKRKV

SEQ ID NO: 1523 - protein, 1682 aa, synthetic construct
MKRTADGSEFESPKKKRKVDKKYSIGLDIGTNSVGWAVITDEYKVPSKKFKVLGNTDRHSIKKNLIGALLFDSGETAEATRLKRTARRRYTRRKNRICYLQEIFSNEMAKVDDSFFHRLEESFLVEEDKKHERHPIFGNIVDEVAYHEKYPTIYHLRKKLVDSTDKADLRLIYLALAHMIKFRGHFLIEGDLNPDNSDVDKLFIQLVQTYNQLFEENPINASGVDAKAILSARLSKSRRLENLIAQLPGEKKNGLFGNLIALSLGLTPNFKSNFDLAEDAKLQLSKDTYDDDLDNLLAQIGDQYADLFLAAKNLSDAILLSDILRVNTEITKAPLSASMIKRYDEHHQDLTLLKALVRQQLPEKYKEIFFDQSKNGYAGYIDGGASQEEFYKFIKPILEKMDGTEELLVKLNREDLLRKQRTFDNGSIPHQIHLGELHAILRRQEDFYPFLKDNREKIEKILTFRIPYYVGPLARGNSRFAWMTRKSEETITPWNFEEVVDKGASAQSFIERMTNFDKNLPNEKVLPKHSLLYEYFTVYNELTKVKYVTEGMRKPAFLSGEQKKAIVDLLFKTNRKVTVKQLKEDYFKKIECFDSVEISGVEDRFNASLGTYHDLLKIIKDKDFLDNEENEDILEDIVLTLTLFEDREMIEERLKTYAHLFDDKVMKQLKRRRYTGWGRLSRKLINGIRDKQSGKTILDFLKSDGFANRNFMQLIHDDSLTFKEDIQKAQVSGQGDSLHEHIANLAGSPAIKKGILQTVKVVDELVKVMGRHKPENIVIEMARENQTTQKGQKNSRERMKRIEEGIKELGSQILKEHPVENTQLQNEKLYLYYLQNGRDMYVDQELDINRLSDYDVDAIVPQSFLKDDSIDNKVLTRSDKNRGKSDNVPSEEVVKKMKNYWRQLLNAKLITQRKFDNLTKAERGGLSELDKAGFIKRQLVETRQITKHVAQILDSRMNTKYDENDKLIREVKVITLKSKLVSDFRKDFQFYKVREINNYHHAHDAYLNAVVGTALIKKYPKLESEFVYGDYKVYDVRKMIAKSEQEIGKATAKYFFYSNIMNFFKTEITLANGEIRKRPLIETNGETGEIVWDKGRDFATVRKVLSMPQVNIVKKTEVQTGGFSKESILPKRNSDKLIARKKDWDPKKYGGFDSPTVAYSVLVVAKVEKGKSKKLKSVKELLGITIMERSSFEKNPIDFLEAKGYKEVKKDLIIKLPKYSLFELENGRKRMLASAGELQKGNELALPSKYVNFLYLASHYEKLKGSPEDNEQKQLFVEQHKHYLDEIIEQISEFSKRVILADANLDKVLSAYNKHRDKPIREQAENIIHLFTLTNLGAPAAFKYFDTTIDRKRYTSTKEVLDATLIHQSITGLYETRIDLSQLGGDSGGSSGGSSGSETPGTSESATPESSGGSSGGSSRWEHRFELKPGRWVFVPTEEAREQGKEIKKQVEKRWKPPAYYYHLRQGGHVAALRCHLDNPWFAHVDLEDFFGQINRSRVTAALKGFFSYEEAWAMACESTVRRPPDSEFMLPYGFVQSPILASLALDKSALGRYLRQLNKNDGLTVSVYMDDIVISGHDEEMLEQAFDELKQAAEKSGFPLNEEKTQGPASQISAFNIELSHNSMEITEERMAEFQEAYRQGNEHQKEGILGYVGSVNPAQSGGSKRTADGSEFEPKKKRKV

SEQ ID NO: 1524 - protein, 1682 aa, synthetic construct
MKRTADGSEFESPKKKRKVDKKYSIGLDIGTNSVGWAVITDEYKVPSKKFKVLGNTDRHSIKKNLIGALLFDSGETAEATRLKRTARRRYTRRKNRICYLQEIFSNEMAKVDDSFFHRLEESFLVEEDKKHERHPIFGNIVDEVAYHEKYPTIYHLRKKLVDSTDKADLRLIYLALAHMIKFRGHFLIEGDLNPDNSDVDKLFIQLVQTYNQLFEENPINASGVDAKAILSARLSKSRRLENLIAQLPGEKKNGLFGNLIALSLGLTPNFKSNFDLAEDAKLQLSKDTYDDDLDNLLAQIGDQYADLFLAAKNLSDAILLSDILRVNTEITKAPLSASMIKRYDEHHQDLTLLKALVRQQLPEKYKEIFFDQSKNGYAGYIDGGASQEEFYKFIKPILEKMDGTEELLVKLNREDLLRKQRTFDNGSIPHQIHLGELHAILRRQEDFYPFLKDNREKIEKILTFRIPYYVGPLARGNSRFAWMTRKSEETITPWNFEEVVDKGASAQSFIERMTNFDKNLPNEKVLPKHSLLYEYFTVYNELTKVKYVTEGMRKPAFLSGEQKKAIVDLLFKTNRKVTVKQLKEDYFKKIECFDSVEISGVEDRFNASLGTYHDLLKIIKDKDFLDNEENEDILEDIVLTLTLFEDREMIEERLKTYAHLFDDKVMKQLKRRRYTGWGRLSRKLINGIRDKQSGKTILDFLKSDGFANRNFMQLIHDDSLTFKEDIQKAQVSGQGDSLHEHIANLAGSPAIKKGILQTVKVVDELVKVMGRHKPENIVIEMARENQTTQKGQKNSRERMKRIEEGIKELGSQILKEHPVENTQLQNEKLYLYYLQNGRDMYVDQELDINRLSDYDVDAIVPQSFLKDDSIDNKVLTRSDKNRGKSDNVPSEEVVKKMKNYWRQLLNAKLITQRKFDNLTKAERGGLSELDKAGFIKRQLVETRQITKHVAQILDSRMNTKYDENDKLIREVKVITLKSKLVSDFRKDFQFYKVREINNYHHAHDAYLNAVVGTALIKKYPKLESEFVYGDYKVYDVRKMIAKSEQEIGKATAKYFFYSNIMNFFKTEITLANGEIRKRPLIETNGETGEIVWDKGRDFATVRKVLSMPQVNIVKKTEVQTGGFSKESILPKRNSDKLIARKKDWDPKKYGGFDSPTVAYSVLVVAKVEKGKSKKLKSVKELLGITIMERSSFEKNPIDFLEAKGYKEVKKDLIIKLPKYSLFELENGRKRMLASAGELQKGNELALPSKYVNFLYLASHYEKLKGSPEDNEQKQLFVEQHKHYLDEIIEQISEFSKRVILADANLDKVLSAYNKHRDKPIREQAENIIHLFTLTNLGAPAAFKYFDTTIDRKRYTSTKEVLDATLIHQSITGLYETRIDLSQLGGDSGGSSGGSSGSETPGTSESATPESSGGSSGGSSRWEHRFELKPGRWVFVPTEEAREQGKEIKKQVEKRWKPPAYYYHLRQGGHVAALRCHLDNPWFAHVDLEDFFGQINRSRVTRALKGFFSPEEAWEMACESTVRRPPDSEFMLPYGFSQSPILASLALDKSALGRYLRQLNKNDGLTVSVYMDDIVISGGDEEMLEQAFDELKQAAEKSGFPLNEEKTQGPASQITAFNIELSHNSMEITEERMAELQEAYRQGNEHQKEGILGYVGSVNPAQSGGSKRTADGSEFEPKKKRKV

SEQ ID NO: 1525 - protein, 245 aa, synthetic construct
KWESRFELKPGKWVFVPTDETIEQGREIKELIEKPWKAPSYYYHLRQGGHVAALKQHLGHTCFIHVDIEDFFGSINRSRITRALKGYFSYEEAREIATESTVRHPEDAERYILPFGFVQSPILASLCLRKSALGRYLHQLSKQDGVVVSVYVDDIIISGNDPERLEQVLEDIKAAAERSGFPLNEEKQQGPAETITAFNIELSQNSLEITPERMAEFRDAMQQSTNEHQREGILGYVRSVNPAQA

SEQ ID NO: 1526 - protein, 245 aa, synthetic construct
KWESRFELKPGKWVFVPTDETIEQGREIKELIEKRWKAPSYYYHLRQGGHVAALKQHLGHTCFIHVDIEDFFGSINRSRITRALKGYFSYEEAREIATESTVRHPEDAERYILPFGFVQSPILASLELRKSALGRYLHQLSKQDGVVVSVYVDDIIISGNDPERLEQVLEDIKAAAERSGFPLNEEKQQGPAETITAFNIELSQNSLEITPERMAEFRDAMQQSTNEHQREGILGYVRSVNPAQA

SEQ ID NO: 1527 - protein, 245 aa, synthetic construct
KWESRFELKPGKWVFVPTDETIEQGREIKELIEKRWKAPSYYYHLRQGGHVAALKQHLGHTCFIHVDIEDFFGSINRSRITRALKGYFSYEEAREIATESTVRHPEDAERYILPFGFVQSPILASLCLRKSALGRYLHQLSKQDGVVVSVYVDDIIISGNDPERLEQVLEDIKAAAEESGFPLNEEKQQGPAETITAFNIELSQNSLEITPERMAEFRDAMQQSTNEHQREGILGYVRSVNPAQA

SEQ ID NO: 1528 - protein, 245 aa, synthetic construct
KWESRFELKPGKWVFVPTDETIEQGREIKELIEKRWKAPSYYYHLRQGGHVAALKQHLGHTCFIHVDIEDFFGSINRSRITRALKGYFSYEEAREIETESTVRHPEDAERYILPFGFVQSPILASLCLRKSALGRYLHQLSKQDGVVVSVYVDDIIISGNDPERLEQVLEDIKAAAERSGFPLNEEKQQGPAETITAFNIELSQNSLEITPERMAEFRDAMQQSTNEHQREGILGYVRSVNPAQA

SEQ ID NO: 1529 - protein, 245 aa, synthetic construct
KWESRFELKPGKWVFVPTDETIEQGREIKELIEKRWKAPSYYYHLRQGGHVAALKQHLGHTCFIHVDIEDFFGSINRSRITRALKGYFSEEEAREIATESTVRHPEDAERYILPFGFVQSPILASLCLRKSALGRYLHQLSKQDGVVVSVYVDDIIISGNDPERLEQVLEDIKAAAERSGFPLNEEKQQGPAETITAFNIELSQNSLEITPERMAEFRDAMQQSTNEHQREGILGYVRSVNPAQA

SEQ ID NO: 1530 - protein, 245 aa, synthetic construct
KWESRFELKPGKWVFVPTDETIEQGREIKELIEKRWKAPSYYYHLRQGGHVAALKQHLGHTCFIHVDIEDFFGSINRSAITRALKGYFSYEEAREIATESTVRHPEDAERYILPFGFVQSPILASLCLRKSALGRYLHQLSKQDGVVVSVYVDDIIISGNDPERLEQVLEDIKAAAERSGFPLNEEKQQGPAETITAFNIELSQNSLEITPERMAEFRDAMQQSTNEHQREGILGYVRSVNPAQA

SEQ ID NO: 1531 - protein, 245 aa, synthetic construct
KWESRFELKPGKWVFVPTDETIEQGREIKELIEKRWKAPSYYYHLRQGGHVAALKQHLGHTCFIHVDIEDFFGSINRSRITRALKGYFSYEEAREIATESTVRHPEDAERYILPFGFVQSPILASLCLRKSALGRYLHQLSKQDGVVVSVYVDDIIISGNDPERLEQVLEDIKAAAERSGFPLNEEKQQGPAETITAFNIELSQNSLEITPERAAEFRDAMQQSTNEHQREGILGYVRSVNPAQA

SEQ ID NO: 1532 - protein, 245 aa, synthetic construct
KWESRFELKPGKWVFVPTDETIEQGREIKELIEKRWKAPSYYYHLRQGGHVAALKQHLGHTCFIHVDIEDFFGSINRSRITRALKGYFSYEEAREIATESTVRHPEDAERYILPFGFVQSPILASLCLRKSALGRYLHQLSKQDGVVVSVYVDDIIISGNDPERLEQVLEDIKAAAERSGFPLNEEKQQGPAETITAFNIELSQNSLEITPERMAEFRDAQQQSTNEHQREGILGYVRSVNPAQA

SEQ ID NO: 1533 - protein, 245 aa, synthetic construct
KWESRRELKPGKWVFVPTDETIEQGREIKELIEKRWKAPSYYYHLRQGGHVAALKQHLGHTCFIHVDIEDFFGSINRSRITRALKGYFSYEEAREIATESTVRHPEDAERYILPFGFVQSPILASLCLRKSALGRYLHQLSKQDGVVVSVYVDDIIISGNDPERLEQVLEDIKAAAERSGFPLNEEKQQGPAETITAFNIELSQNSLEITPERMAEFRDAMQQSTNEHQREGILGYVRSVNPAQA

SEQ ID NO: 1534 - protein, 245 aa, synthetic construct
KWESRFELKPGKWVFVPTDETIEQGREIKELIEKRWKAPSYYYHLRQGGHVAALKQHLGHTCFIHVDIEDFFGSINRDRITRALKGYFSYEEAREIATESTVRHPEDAERYILPFGFVQSPILASLCLRKSALGRYLHQLSKQDGVVVSVYVDDIIISGNDPERLEQVLEDIKAAAERSGFPLNEEKQQGPAETITAFNIELSQNSLEITPERMAEFRDAMQQSTNEHQREGILGYVRSVNPAQA

SEQ ID NO: 1535 - protein, 245 aa, synthetic construct
KWESRFELKPGKWVFVPTDETIEQGREIKELIEKRWKAPSYYYHLRQGGHVAALKQHLGHTCFIHVDIEDFFGSINRSSITRALKGYFSYEEAPEIATESTVRHPEDAERYILPFGFVQSPILASLCLRKSALGRYLHQLSKQDGVVVSVYVDDIIISGNDPERLEQVLEDIKAAAEESGFPLNEEKQQGPAETITAFNIELSQNSLEITPERMAEFRDARQQSTNEHQREGILGYVRSVNPAQA

SEQ ID NO: 1536 - protein, 245 aa, synthetic construct
KWESRFELKPGKWVFVPTDETIEQGREIKELIEKRWKAPSYYYHLRQGGHVAALKQHLGHTCFIHVDIEDFFGSINRSRITRALKGYFSYEEAREIATESTVRHPEDAERYILPFGFVQSPILASLCLRKSALGRYLHQLSKQDGVVVSVYVDDIIISGNDPERLEQVLEDIKAAAEPSGFPLNEEKQQGPAETITAFNIELSQNSLEITPERMAEFRDAMQQSTNEHQREGILGYVRSVNPAQA

SEQ ID NO: 1537 - protein, 245 aa, synthetic construct
KWESRFELKPGKWVFVPTDETIEQGREIKELIEKRWKAPSYYYHLRQGGHVAALKQHLGHTCFIHVDIEDFFGSINRSIITRALKGYFSYEEAREIATESTVRHPEDAERYILPFGFVQSPILASLCLRKSALGRYLHQLSKQDGVVVSVYVDDIIISGNDPERLEQVLEDIKAAAEESGFPLNEEKQQGPAETITAFNIELSQNSLEITPERMAEFRDARQQSTNEHQREGILGYVRSVNPAQA

SEQ ID NO: 1538 - protein, 245 aa, synthetic construct
KWESRFELKPGKWVFVPTDETIEQGREIKELIEKRWKAPSYYYHLRQGGHVAALKQHLGHTCFIHVDIEDFFGSINRSRITRALKGYFSYEEAREIATESTVRHPEDAERYILPFGFVQSPILASLCLRKSALGRYLHQLSKQDGVVVSVYVDDIIISGNDPERLEQVLEDIKAAAEESGFPLNEEKQQGPAETITAFNIELSQNSLEITPERHAEFRDAMQQSTNEHQREGILGYVRSVNPAQA

SEQ ID NO: 1539 - protein, 245 aa, synthetic construct
KWESRFELKPGKWVFVPTDETIEQGREIKELIEKRWKAPSYYYHLRQGGHVAALKQHLGHTCFIHVDIEDFFGSINRSRITRALKGYFSAEEAREIATESTVRHPEDAERYILPFGFVQSPILASLCLRKSALGRYLHQLSKQDGVVVSVYVDDIIISGNDPERLEQVLEDIKAAAEESGFPLNEEKQQGPAETITAFNIELSQNSLEITPERHAEFRDAMQQSTNEHQREGILGYVRSVNPAQA

SEQ ID NO: 1540 - protein, 245 aa, synthetic construct
KWESRFELKPGKWVFVPTDETIEQGREIKELIEKHWKAPSYYYHLRQGGHVAALKQHLGHTCFIHVDIEDFFGSINRSDITRALKGYFSYEEAREIATESTVRHPEDAERYILPFGFVQSPILASLCLRKSALGRYLHQLSKQDGVVVSVYVDDIIISGNDPERLEQVLEDIKAAAEESGFPLNEEKQQGPAETITAFNIELSQNSLEITPERHAEFRDAMQQSTNEHQREGILGYVRSVNPAQA

SEQ ID NO: 1541 - protein, 245 aa, synthetic construct
KWESRFELKPGKWVFVPTDETIEQGREIKELIEKPWKAPSYYYHLRQGGHVAALKQHLGHTCFIHVDIEDFFGSINRSIITRALKGYFSYEEAREIATESTVRHPEDAERYILPFGFVQSPILASLCLRKSALGRYLHQLSKQDGVVVSVYVDDIIISGNDPERLEQVLEDIKAAAEESGFPLNEEKQQGPAETITAFNIELSQNSLEITPERTAEFRDAMQQSTNEHQREGILGYVRSVNPAQA

SEQ ID NO: 1542 - protein, 245 aa, synthetic construct
KWESRFELKPGKWVFVPTDETIEQGREIKELIEKPWKAPSYYYHLRQGGHVAALKQHLGHTCFIHVDIEDFFGSINRSRITRALKGYFSYEEAREIATESTVRHPEDAERYILPFGFVQSPILASLCLRKSALGRYLHQLSKQDGVVVSVYVDDIIISGNDPERLEQVLEDIKAAAEESGFPLNEEKQQGPAETITAFNIELSQNSLEITPERTAEFRDAMQQSTNEHQREGILGYVRSVNPAQA

SEQ ID NO: 1543 - protein, 245 aa, synthetic construct
KWESRFELKPGKWVFVPTDETIEQGREIKELIEKRWKAPSYYYHLRQGGHVAALKQHLGHTCFIHVDIEDFFGSINRSYITRALKGYFSPEEAREIATESTVRHPEDAERYILPFGFVQSPILASLCLRKSALGRYLHQLSKQDGVVVSVYVDDIIISGNDPERLEQVLEDIKAAAERSGFPLNEEKQQGPAETITAFNIELSQNSLEITPERMAEFRDARQQSTNEHQREGILGYVRSVNPAQA

SEQ ID NO: 1544 - protein, 245 aa, synthetic construct
KWESRFELKPGKWVFVPTDETIEQGREIKELIEKRWKAPSYYYHLRQGGHVAALKQHLGHTCFIHVDIEDFFGSINRSRITRALKGYFSAEEAPEIATESTVRHPEDAERYILPFGFVQSPILASLCLRKSALGRYLHQLSKQDGVVVSVYVDDIIISGNDPERLEQVLEDIKAAAERSGFPLNEEKQQGPAETITAFNIELSQNSLEITPERMAEFRDARQQSTNEHQREGILGYVRSVNPAQA

SEQ ID NO: 1545 - protein, 245 aa, synthetic construct
KWESRFELKPGKWVFVPTDETIEQGREIKELIEKRWKAPSYYYHLRQGGHVAALKQHLGHTCFIHVDIEDFFGSINRSSITRALKGYFSAEEAPEIATESTVRHPEDAERYILPFGFVQSPILASLCLRKSALGRYLHQLSKQDGVVVSVYVDDIIISGNDPERLEQVLEDIKAAAERSGFPLNEEKQQGPAETITAFNIELSQNSLEITPERMAEFRDAMQQSTNEHQREGILGYVRSVNPAQA

SEQ ID NO: 1546 - protein, 245 aa, synthetic construct
KWESRFELKPGKWVFVPTDETIEQGREIKELIEKRWKAPSYYYHLRQGGHVAALKQHLGHTCFIHVDIEDFFGSINRSYITRALKGYFSYEEAPEIATESTVRHPEDAERYILPFGFVQSPILASLCLRKSALGRYLHQLSKQDGVVVSVYVDDIIISGNDPERLEQVLEDIKAAAERSGFPLNEEKQQGPAETITAFNIELSQNSLEITPERMAEFRDAMQQSTNEHQREGILGYVRSVNPAQA

SEQ ID NO: 1547 - protein, 245 aa, synthetic construct
KWESRFELKPGKWVFVPTDETIEQGREIKELIEKRWKAPSYYYHLRQGGHVAALKQHLGHTCFIHVDIEDFFGSINRSRITRALKGYFSYEEAREIATESTVRHPEDAERYILPFGFVQSPILASLCLRKSALGRYLHQLSKQDGVVVSVYVDDIIISGNDPERLEQVLEDIKAAAERSGFPLNEEKQQGPAETITAFNIELSQNSLEITPERMAEFRDARQQSTNEHQREGILGYVRSVNPAQA

SEQ ID NO: 1548 - protein, 245 aa, synthetic construct
KWESRFELKPGKWVFVPTDETIEQGREIKELIEKPWKAPSYYYHLRQGGHVAALKQHLGHTCFIHVDIEDFFGSINRSRITRALKGYFSYEEAPEIATESTVRHPEDAERYILPFGFVQSPILASLCLRKSALGRYLHQLSKQDGVVVSVYVDDIIISGNDPERLEQVLEDIKAAAERSGFPLNEEKQQGPAETITAFNIELSQNSLEITPERMAEFRDAMQQSTNEHQREGILGYVRSVNPAQA

SEQ ID NO: 1549 - protein, 245 aa, synthetic construct
KWESRFELKPGKWVFVPTDETIEQGREIKELIEKPWKAPSYYYHLRQGGHVAALKQHLGHTCFIHVDIEDFFGSINRSDITRALKGYFSYEEAREIATESTVRHPEDAERYILPFGFVQSPILASLCLRKSALGRYLHQLSKQDGVVVSVYVDDIIISGNDPERLEQVLEDIKAAAERSGFPLNEEKQQGPAETITAFNIELSQNSLEITPERMAEFRDAMQQSTNEHQREGILGYVRSVNPAQA

SEQ ID NO: 1550 - protein, 245 aa, synthetic construct
KWESRFELKPGKWVFVPTDETIEQGREIKELIEKRWKAPSYYYHLRQGGHVAALKQHLGHTCFIHVDIEDFFGSINRSDITRALKGYFSYEEAREIATESTVRHPEDAERYILPFGFVQSPILASLCLRKSALGRYLHQLSKQDGVVVSVYVDDIIISGNDPERLEQVLEDIKAAAERSGFPLNEEKQQGPAETITAFNIELSQNSLEITPERTAEFRDARQQSTNEHQREGILGYVRSVNPAQA

SEQ ID NO: 1551 - protein, 245 aa, synthetic construct
KWESRFELKPGKWVFVPTDETIEQGREIKELIEKRWKAPSYYYHLRQGGHVAALKQHLGHTCFIHVDIEDFFGSINRSIITRALKGYFSYEEAREIATESTVRHPEDAERYILPFGFVQSPILASLCLRKSALGRYLHQLSKQDGVVVSVYVDDIIISGNDPERLEQVLEDIKAAAERSGFPLNEEKQQGPAETITAFNIELSQNSLEITPERMAEFRDAMQQSTNEHQREGILGYVRSVNPAQA

SEQ ID NO: 1552 - protein, 245 aa, synthetic construct
KWESRFELKPGKWVFVPTDETIEQGREIKELIEKRWKAPSYYYHLRQGGHVAALKQHLGHTCFIHVDIEDFFGSINRSRITRALKGYFSYEEAAEIATESTVRHPEDAERYILPFGFVQSPILASLCLRKSALGRYLHQLSKQDGVVVSVYVDDIIISGNDPERLEQVLEDIKAAAERSGFPLNEEKQQGPAETITAFNIELSQNSLEITPERMAEFRDAMQQSTNEHQREGILGYVRSVNPAQA

SEQ ID NO: 1553 - protein, 245 aa, synthetic construct
KWESRFELKPGKWVFVPTDETIEQGREIKELIEKRWKAPSYYYHLRQGGHVAALKQHLGHTCFIHVDIEDFFGSINRSRITRALKGYFSYEEAREIATESTVRHPEDAERYILPFGFVQSPILASLCLRKSALGRYLHQLSKQDGVVVSVYVDDIIISGNDPERLEQVLEDIKAAAERSGFPLNEEKQQGPAETITAFNIELSQNSLEITPERMAEFRDAMQQSTNEHQREGILGYQRSVNPAQA

SEQ ID NO: 1554 - protein, 245 aa, synthetic construct
KWESRFELKPGKWVFVPTDETIEQGREIKELIEKRWKAPSYYYHLRQGGHVAALKQHLGHTCFIHVDIEDFFGSINRSWITRALKGYFSYEEAREIATESTVRHPEDAERYILPFGFVQSPILASLCLRKSALGRYLHQLSKQDGVVVSVYVDDIIISGNDPERLEQVLEDIKAAAERSGFPLNEEKQQGPAETITAFNIELSQNSLEITPERMAEFRDAMQQSTNEHQREGILGYVRSVNPAQA

SEQ ID NO: 1555 - protein, 245 aa, synthetic construct
KWESRFELKPGKWVFVPTDETIEQGREIKELIEKRWKAPSYYYHLRQGGHVAALKQHLGHTCFIHVDIEDFFGSINRSLITRALKGYFSYEEAREIATESTVRHPEDAERYILPFGFVQSPILASLCLRKSALGRYLHQLSKQDGVVVSVYVDDIIISGNDPERLEQVLEDIKAAAERSGFPLNEEKQQGPAETITAFNIELSQNSLEITPERMAEFRDAMQQSTNEHQREGILGYVRSVNPAQA

SEQ ID NO: 1556 - protein, 245 aa, synthetic construct
KWESRFELKPGKWVFVPTDETIEQGREIKELIEKRWKAPSYYYHLRQGGHVAALKQHLGHTCFIHVDIEDFFGSINRSRITRALKGYFSYEEAREIATESTVRHPEDAERYILPFGFVQSPILASLCLRKSALGRYLHQLSKQDGVVVSVYVDDIIISGNDPERLEQVLEDIKAAAEDSGFPLNEEKQQGPAETITAFNIELSQNSLEITPERMAEFRDAMQQSTNEHQREGILGYVRSVNPAQA

SEQ ID NO: 1557 - protein, 245 aa, synthetic construct
KWESRFELKPGKWVFVPTDETIEQGREIKELIEKRWKAPSYYYHLRQGGHVAALKQHLGHTCFIHVDIEDFFGSINRSEITRALKGYFSPEEAREIATESTVRHPEDAERYILPFGFVQSPILASLCLRKSALGRYLHQLSKQDGVVVSVYVDDIIISGNDPERLEQVLEDIKAAAEESGFPLNEEKQQGPAETITAFNIELSQNSLEITPERMAEFRDAMQQSTNEHQREGILGYVRSVNPAQA

SEQ ID NO: 1558 - protein, 245 aa, synthetic construct
KWESRFELKPGKWVFVPTDETIEQGREIKELIEKRWKAPSYYYHLRQGGHVAALKQHLGHTCFIHVDIEDFFGSINRSRITRALKGYFSPEEAREIATESTVRHPEDAERYILPFGFVQSPILASLCLRKSALGRYLHQLSKQDGVVVSVYVDDIIISGNDPERLEQVLEDIKAAAEESGFPLNEEKQQGPAETITAFNIELSQNSLEITPERMAEFRDAMQQSTNEHQREGILGYVRSVNPAQA

SEQ ID NO: 1559 - protein, 245 aa, synthetic construct
KWESRFELKPGKWVFVPTDETIEQGREIKELIEKPWKAPSYYYHLRQGGHVAALKQHLGHTCFIHVDIEDFFGSINRSRITRALKGYFSYEEAREIATESTVRHPEDAERYILPFGFVQSPILASLCLRKSALGRYLHQLSKQDGVVVSVYVDDIIISGNDPERLEQVLEDIKAAAEESGFPLNEEKQQGPAETITAFNIELSQNSLEITPERHAEFRDAMQQSTNEHQREGILGYVRSVNPAQA

SEQ ID NO: 1560 - protein, 1685 aa, synthetic construct
MKRTADGSEFESPKKKRKVDKKYSIGLDIGTNSVGWAVITDEYKVPSKKFKVLGNTDRHSIKKNLIGALLFDSGETAEATRLKRTARRRYTRRKNRICYLQEIFSNEMAKVDDSFFHRLEESFLVEEDKKHERHPIFGNIVDEVAYHEKYPTIYHLRKKLVDSTDKADLRLIYLALAHMIKFRGHFLIEGDLNPDNSDVDKLFIQLVQTYNQLFEENPINASGVDAKAILSARLSKSRRLENLIAQLPGEKKNGLFGNLIALSLGLTPNFKSNFDLAEDAKLQLSKDTYDDDLDNLLAQIGDQYADLFLAAKNLSDAILLSDILRVNTEITKAPLSASMIKRYDEHHQDLTLLKALVRQQLPEKYKEIFFDQSKNGYAGYIDGGASQEEFYKFIKPILEKMDGTEELLVKLNREDLLRKQRTFDNGSIPHQIHLGELHAILRRQEDFYPFLKDNREKIEKILTFRIPYYVGPLARGNSRFAWMTRKSEETITPWNFEEVVDKGASAQSFIERMTNFDKNLPNEKVLPKHSLLYEYFTVYNELTKVKYVTEGMRKPAFLSGEQKKAIVDLLFKTNRKVTVKQLKEDYFKKIECFDSVEISGVEDRFNASLGTYHDLLKIIKDKDFLDNEENEDILEDIVLTLTLFEDREMIEERLKTYAHLFDDKVMKQLKRRRYTGWGRLSRKLINGIRDKQSGKTILDFLKSDGFANRNFMQLIHDDSLTFKEDIQKAQVSGQGDSLHEHIANLAGSPAIKKGILQTVKVVDELVKVMGRHKPENIVIEMARENQTTQKGQKNSRERMKRIEEGIKELGSQILKEHPVENTQLQNEKLYLYYLQNGRDMYVDQELDINRLSDYDVDAIVPQSFLKDDSIDNKVLTRSDKNRGKSDNVPSEEVVKKMKNYWRQLLNAKLITQRKFDNLTKAERGGLSELDKAGFIKRQLVETRQITKHVAQILDSRMNTKYDENDKLIREVKVITLKSKLVSDFRKDFQFYKVREINNYHHAHDAYLNAVVGTALIKKYPKLESEFVYGDYKVYDVRKMIAKSEQEIGKATAKYFFYSNIMNFFKTEITLANGEIRKRPLIETNGETGEIVWDKGRDFATVRKVLSMPQVNIVKKTEVQTGGFSKESILPKRNSDKLIARKKDWDPKKYGGFDSPTVAYSVLVVAKVEKGKSKKLKSVKELLGITIMERSSFEKNPIDFLEAKGYKEVKKDLIIKLPKYSLFELENGRKRMLASAGELQKGNELALPSKYVNFLYLASHYEKLKGSPEDNEQKQLFVEQHKHYLDEIIEQISEFSKRVILADANLDKVLSAYNKHRDKPIREQAENIIHLFTLTNLGAPAAFKYFDTTIDRKRYTSTKEVLDATLIHQSITGLYETRIDLSQLGGDSGGSSGGSSGSETPGTSESATPESSGGSSGGSSKWESRFELKPGKWVFVPTDETIEQGREIKELIEKPWKAPSYYYHLRQGGHVAALKQHLGHTCFIHVDIEDFFGSINRSRITRALKGYFSYEEAREIATESTVRHPEDAERYILPFGFVQSPILASLCLRKSALGRYLHQLSKQDGVVVSVYVDDIIISGNDPERLEQVLEDIKAAAERSGFPLNEEKQQGPAETITAFNIELSQNSLEITPERMAEFRDAMQQSTNEHQREGILGYVRSVNPAQASGGSKRTADGSEFEPKKKRKV

SEQ ID NO: 1561 - protein, 1685 aa, synthetic construct
MKRTADGSEFESPKKKRKVDKKYSIGLDIGTNSVGWAVITDEYKVPSKKFKVLGNTDRHSIKKNLIGALLFDSGETAEATRLKRTARRRYTRRKNRICYLQEIFSNEMAKVDDSFFHRLEESFLVEEDKKHERHPIFGNIVDEVAYHEKYPTIYHLRKKLVDSTDKADLRLIYLALAHMIKFRGHFLIEGDLNPDNSDVDKLFIQLVQTYNQLFEENPINASGVDAKAILSARLSKSRRLENLIAQLPGEKKNGLFGNLIALSLGLTPNFKSNFDLAEDAKLQLSKDTYDDDLDNLLAQIGDQYADLFLAAKNLSDAILLSDILRVNTEITKAPLSASMIKRYDEHHQDLTLLKALVRQQLPEKYKEIFFDQSKNGYAGYIDGGASQEEFYKFIKPILEKMDGTEELLVKLNREDLLRKQRTFDNGSIPHQIHLGELHAILRRQEDFYPFLKDNREKIEKILTFRIPYYVGPLARGNSRFAWMTRKSEETITPWNFEEVVDKGASAQSFIERMTNFDKNLPNEKVLPKHSLLYEYFTVYNELTKVKYVTEGMRKPAFLSGEQKKAIVDLLFKTNRKVTVKQLKEDYFKKIECFDSVEISGVEDRFNASLGTYHDLLKIIKDKDFLDNEENEDILEDIVLTLTLFEDREMIEERLKTYAHLFDDKVMKQLKRRRYTGWGRLSRKLINGIRDKQSGKTILDFLKSDGFANRNFMQLIHDDSLTFKEDIQKAQVSGQGDSLHEHIANLAGSPAIKKGILQTVKVVDELVKVMGRHKPENIVIEMARENQTTQKGQKNSRERMKRIEEGIKELGSQILKEHPVENTQLQNEKLYLYYLQNGRDMYVDQELDINRLSDYDVDAIVPQSFLKDDSIDNKVLTRSDKNRGKSDNVPSEEVVKKMKNYWRQLLNAKLITQRKFDNLTKAERGGLSELDKAGFIKRQLVETRQITKHVAQILDSRMNTKYDENDKLIREVKVITLKSKLVSDFRKDFQFYKVREINNYHHAHDAYLNAVVGTALIKKYPKLESEFVYGDYKVYDVRKMIAKSEQEIGKATAKYFFYSNIMNFFKTEITLANGEIRKRPLIETNGETGEIVWDKGRDFATVRKVLSMPQVNIVKKTEVQTGGFSKESILPKRNSDKLIARKKDWDPKKYGGFDSPTVAYSVLVVAKVEKGKSKKLKSVKELLGITIMERSSFEKNPIDFLEAKGYKEVKKDLIIKLPKYSLFELENGRKRMLASAGELQKGNELALPSKYVNFLYLASHYEKLKGSPEDNEQKQLFVEQHKHYLDEIIEQISEFSKRVILADANLDKVLSAYNKHRDKPIREQAENIIHLFTLTNLGAPAAFKYFDTTIDRKRYTSTKEVLDATLIHQSITGLYETRIDLSQLGGDSGGSSGGSSGSETPGTSESATPESSGGSSGGSSKWESRFELKPGKWVFVPTDETIEQGREIKELIEKRWKAPSYYYHLRQGGHVAALKQHLGHTCFIHVDIEDFFGSINRSRITRALKGYFSYEEAREIATESTVRHPEDAERYILPFGFVQSPILASLELRKSALGRYLHQLSKQDGVVVSVYVDDIIISGNDPERLEQVLEDIKAAAERSGFPLNEEKQQGPAETITAFNIELSQNSLEITPERMAEFRDAMQQSTNEHQREGILGYVRSVNPAQASGGSKRTADGSEFEPKKKRKV

SEQ ID NO: 1562 - protein, 1685 aa, synthetic construct
MKRTADGSEFESPKKKRKVDKKYSIGLDIGTNSVGWAVITDEYKVPSKKFKVLGNTDRHSIKKNLIGALLFDSGETAEATRLKRTARRRYTRRKNRICYLQEIFSNEMAKVDDSFFHRLEESFLVEEDKKHERHPIFGNIVDEVAYHEKYPTIYHLRKKLVDSTDKADLRLIYLALAHMIKFRGHFLIEGDLNPDNSDVDKLFIQLVQTYNQLFEENPINASGVDAKAILSARLSKSRRLENLIAQLPGEKKNGLFGNLIALSLGLTPNFKSNFDLAEDAKLQLSKDTYDDDLDNLLAQIGDQYADLFLAAKNLSDAILLSDILRVNTEITKAPLSASMIKRYDEHHQDLTLLKALVRQQLPEKYKEIFFDQSKNGYAGYIDGGASQEEFYKFIKPILEKMDGTEELLVKLNREDLLRKQRTFDNGSIPHQIHLGELHAILRRQEDFYPFLKDNREKIEKILTFRIPYYVGPLARGNSRFAWMTRKSEETITPWNFEEVVDKGASAQSFIERMTNFDKNLPNEKVLPKHSLLYEYFTVYNELTKVKYVTEGMRKPAFLSGEQKKAIVDLLFKTNRKVTVKQLKEDYFKKIECFDSVEISGVEDRFNASLGTYHDLLKIIKDKDFLDNEENEDILEDIVLTLTLFEDREMIEERLKTYAHLFDDKVMKQLKRRRYTGWGRLSRKLINGIRDKQSGKTILDFLKSDGFANRNFMQLIHDDSLTFKEDIQKAQVSGQGDSLHEHIANLAGSPAIKKGILQTVKVVDELVKVMGRHKPENIVIEMARENQTTQKGQKNSRERMKRIEEGIKELGSQILKEHPVENTQLQNEKLYLYYLQNGRDMYVDQELDINRLSDYDVDAIVPQSFLKDDSIDNKVLTRSDKNRGKSDNVPSEEVVKKMKNYWRQLLNAKLITQRKFDNLTKAERGGLSELDKAGFIKRQLVETRQITKHVAQILDSRMNTKYDENDKLIREVKVITLKSKLVSDFRKDFQFYKVREINNYHHAHDAYLNAVVGTALIKKYPKLESEFVYGDYKVYDVRKMIAKSEQEIGKATAKYFFYSNIMNFFKTEITLANGEIRKRPLIETNGETGEIVWDKGRDFATVRKVLSMPQVNIVKKTEVQTGGFSKESILPKRNSDKLIARKKDWDPKKYGGFDSPTVAYSVLVVAKVEKGKSKKLKSVKELLGITIMERSSFEKNPIDFLEAKGYKEVKKDLIIKLPKYSLFELENGRKRMLASAGELQKGNELALPSKYVNFLYLASHYEKLKGSPEDNEQKQLFVEQHKHYLDEIIEQISEFSKRVILADANLDKVLSAYNKHRDKPIREQAENIIHLFTLTNLGAPAAFKYFDTTIDRKRYTSTKEVLDATLIHQSITGLYETRIDLSQLGGDSGGSSGGSSGSETPGTSESATPESSGGSSGGSSKWESRFELKPGKWVFVPTDETIEQGREIKELIEKRWKAPSYYYHLRQGGHVAALKQHLGHTCFIHVDIEDFFGSINRSRITRALKGYFSYEEAREIATESTVRHPEDAERYILPFGFVQSPILASLCLRKSALGRYLHQLSKQDGVVVSVYVDDIIISGNDPERLEQVLEDIKAAAEESGFPLNEEKQQGPAETITAFNIELSQNSLEITPERMAEFRDAMQQSTNEHQREGILGYVRSVNPAQASGGSKRTADGSEFEPKKKRKV

SEQ ID NO: 1563 - protein, 1685 aa, synthetic construct
MKRTADGSEFESPKKKRKVDKKYSIGLDIGTNSVGWAVITDEYKVPSKKFKVLGNTDRHSIKKNLIGALLFDSGETAEATRLKRTARRRYTRRKNRICYLQEIFSNEMAKVDDSFFHRLEESFLVEEDKKHERHPIFGNIVDEVAYHEKYPTIYHLRKKLVDSTDKADLRLIYLALAHMIKFRGHFLIEGDLNPDNSDVDKLFIQLVQTYNQLFEENPINASGVDAKAILSARLSKSRRLENLIAQLPGEKKNGLFGNLIALSLGLTPNFKSNFDLAEDAKLQLSKDTYDDDLDNLLAQIGDQYADLFLAAKNLSDAILLSDILRVNTEITKAPLSASMIKRYDEHHQDLTLLKALVRQQLPEKYKEIFFDQSKNGYAGYIDGGASQEEFYKFIKPILEKMDGTEELLVKLNREDLLRKQRTFDNGSIPHQIHLGELHAILRRQEDFYPFLKDNREKIEKILTFRIPYYVGPLARGNSRFAWMTRKSEETITPWNFEEVVDKGASAQSFIERMTNFDKNLPNEKVLPKHSLLYEYFTVYNELTKVKYVTEGMRKPAFLSGEQKKAIVDLLFKTNRKVTVKQLKEDYFKKIECFDSVEISGVEDRFNASLGTYHDLLKIIKDKDFLDNEENEDILEDIVLTLTLFEDREMIEERLKTYAHLFDDKVMKQLKRRRYTGWGRLSRKLINGIRDKQSGKTILDFLKSDGFANRNFMQLIHDDSLTFKEDIQKAQVSGQGDSLHEHIANLAGSPAIKKGILQTVKVVDELVKVMGRHKPENIVIEMARENQTTQKGQKNSRERMKRIEEGIKELGSQILKEHPVENTQLQNEKLYLYYLQNGRDMYVDQELDINRLSDYDVDAIVPQSFLKDDSIDNKVLTRSDKNRGKSDNVPSEEVVKKMKNYWRQLLNAKLITQRKFDNLTKAERGGLSELDKAGFIKRQLVETRQITKHVAQILDSRMNTKYDENDKLIREVKVITLKSKLVSDFRKDFQFYKVREINNYHHAHDAYLNAVVGTALIKKYPKLESEFVYGDYKVYDVRKMIAKSEQEIGKATAKYFFYSNIMNFFKTEITLANGEIRKRPLIETNGETGEIVWDKGRDFATVRKVLSMPQVNIVKKTEVQTGGFSKESILPKRNSDKLIARKKDWDPKKYGGFDSPTVAYSVLVVAKVEKGKSKKLKSVKELLGITIMERSSFEKNPIDFLEAKGYKEVKKDLIIKLPKYSLFELENGRKRMLASAGELQKGNELALPSKYVNFLYLASHYEKLKGSPEDNEQKQLFVEQHKHYLDEIIEQISEFSKRVILADANLDKVLSAYNKHRDKPIREQAENIIHLFTLTNLGAPAAFKYFDTTIDRKRYTSTKEVLDATLIHQSITGLYETRIDLSQLGGDSGGSSGGSSGSETPGTSESATPESSGGSSGGSSKWESRFELKPGKWVFVPTDETIEQGREIKELIEKRWKAPSYYYHLRQGGHVAALKQHLGHTCFIHVDIEDFFGSINRSRITRALKGYFSYEEAREIETESTVRHPEDAERYILPFGFVQSPILASLCLRKSALGRYLHQLSKQDGVVVSVYVDDIIISGNDPERLEQVLEDIKAAAERSGFPLNEEKQQGPAETITAFNIELSQNSLEITPERMAEFRDAMQQSTNEHQREGILGYVRSVNPAQASGGSKRTADGSEFEPKKKRKV

SEQ ID NO: 1564 - protein, 1685 aa, synthetic construct
MKRTADGSEFESPKKKRKVDKKYSIGLDIGTNSVGWAVITDEYKVPSKKFKVLGNTDRHSIKKNLIGALLFDSGETAEATRLKRTARRRYTRRKNRICYLQEIFSNEMAKVDDSFFHRLEESFLVEEDKKHERHPIFGNIVDEVAYHEKYPTIYHLRKKLVDSTDKADLRLIYLALAHMIKFRGHFLIEGDLNPDNSDVDKLFIQLVQTYNQLFEENPINASGVDAKAILSARLSKSRRLENLIAQLPGEKKNGLFGNLIALSLGLTPNFKSNFDLAEDAKLQLSKDTYDDDLDNLLAQIGDQYADLFLAAKNLSDAILLSDILRVNTEITKAPLSASMIKRYDEHHQDLTLLKALVRQQLPEKYKEIFFDQSKNGYAGYIDGGASQEEFYKFIKPILEKMDGTEELLVKLNREDLLRKQRTFDNGSIPHQIHLGELHAILRRQEDFYPFLKDNREKIEKILTFRIPYYVGPLARGNSRFAWMTRKSEETITPWNFEEVVDKGASAQSFIERMTNFDKNLPNEKVLPKHSLLYEYFTVYNELTKVKYVTEGMRKPAFLSGEQKKAIVDLLFKTNRKVTVKQLKEDYFKKIECFDSVEISGVEDRFNASLGTYHDLLKIIKDKDFLDNEENEDILEDIVLTLTLFEDREMIEERLKTYAHLFDDKVMKQLKRRRYTGWGRLSRKLINGIRDKQSGKTILDFLKSDGFANRNFMQLIHDDSLTFKEDIQKAQVSGQGDSLHEHIANLAGSPAIKKGILQTVKVVDELVKVMGRHKPENIVIEMARENQTTQKGQKNSRERMKRIEEGIKELGSQILKEHPVENTQLQNEKLYLYYLQNGRDMYVDQELDINRLSDYDVDAIVPQSFLKDDSIDNKVLTRSDKNRGKSDNVPSEEVVKKMKNYWRQLLNAKLITQRKFDNLTKAERGGLSELDKAGFIKRQLVETRQITKHVAQILDSRMNTKYDENDKLIREVKVITLKSKLVSDFRKDFQFYKVREINNYHHAHDAYLNAVVGTALIKKYPKLESEFVYGDYKVYDVRKMIAKSEQEIGKATAKYFFYSNIMNFFKTEITLANGEIRKRPLIETNGETGEIVWDKGRDFATVRKVLSMPQVNIVKKTEVQTGGFSKESILPKRNSDKLIARKKDWDPKKYGGFDSPTVAYSVLVVAKVEKGKSKKLKSVKELLGITIMERSSFEKNPIDFLEAKGYKEVKKDLIIKLPKYSLFELENGRKRMLASAGELQKGNELALPSKYVNFLYLASHYEKLKGSPEDNEQKQLFVEQHKHYLDEIIEQISEFSKRVILADANLDKVLSAYNKHRDKPIREQAENIIHLFTLTNLGAPAAFKYFDTTIDRKRYTSTKEVLDATLIHQSITGLYETRIDLSQLGGDSGGSSGGSSGSETPGTSESATPESSGGSSGGSSKWESRFELKPGKWVFVPTDETIEQGREIKELIEKRWKAPSYYYHLRQGGHVAALKQHLGHTCFIHVDIEDFFGSINRSRITRALKGYFSEEEAREIATESTVRHPEDAERYILPFGFVQSPILASLCLRKSALGRYLHQLSKQDGVVVSVYVDDIIISGNDPERLEQVLEDIKAAAERSGFPLNEEKQQGPAETITAFNIELSQNSLEITPERMAEFRDAMQQSTNEHQREGILGYVRSVNPAQASGGSKRTADGSEFEPKKKRKV

SEQ ID NO: 1565 - protein, 1685 aa, synthetic construct
MKRTADGSEFESPKKKRKVDKKYSIGLDIGTNSVGWAVITDEYKVPSKKFKVLGNTDRHSIKKNLIGALLFDSGETAEATRLKRTARRRYTRRKNRICYLQEIFSNEMAKVDDSFFHRLEESFLVEEDKKHERHPIFGNIVDEVAYHEKYPTIYHLRKKLVDSTDKADLRLIYLALAHMIKFRGHFLIEGDLNPDNSDVDKLFIQLVQTYNQLFEENPINASGVDAKAILSARLSKSRRLENLIAQLPGEKKNGLFGNLIALSLGLTPNFKSNFDLAEDAKLQLSKDTYDDDLDNLLAQIGDQYADLFLAAKNLSDAILLSDILRVNTEITKAPLSASMIKRYDEHHQDLTLLKALVRQQLPEKYKEIFFDQSKNGYAGYIDGGASQEEFYKFIKPILEKMDGTEELLVKLNREDLLRKQRTFDNGSIPHQIHLGELHAILRRQEDFYPFLKDNREKIEKILTFRIPYYVGPLARGNSRFAWMTRKSEETITPWNFEEVVDKGASAQSFIERMTNFDKNLPNEKVLPKHSLLYEYFTVYNELTKVKYVTEGMRKPAFLSGEQKKAIVDLLFKTNRKVTVKQLKEDYFKKIECFDSVEISGVEDRFNASLGTYHDLLKIIKDKDFLDNEENEDILEDIVLTLTLFEDREMIEERLKTYAHLFDDKVMKQLKRRRYTGWGRLSRKLINGIRDKQSGKTILDFLKSDGFANRNFMQLIHDDSLTFKEDIQKAQVSGQGDSLHEHIANLAGSPAIKKGILQTVKVVDELVKVMGRHKPENIVIEMARENQTTQKGQKNSRERMKRIEEGIKELGSQILKEHPVENTQLQNEKLYLYYLQNGRDMYVDQELDINRLSDYDVDAIVPQSFLKDDSIDNKVLTRSDKNRGKSDNVPSEEVVKKMKNYWRQLLNAKLITQRKFDNLTKAERGGLSELDKAGFIKRQLVETRQITKHVAQILDSRMNTKYDENDKLIREVKVITLKSKLVSDFRKDFQFYKVREINNYHHAHDAYLNAVVGTALIKKYPKLESEFVYGDYKVYDVRKMIAKSEQEIGKATAKYFFYSNIMNFFKTEITLANGEIRKRPLIETNGETGEIVWDKGRDFATVRKVLSMPQVNIVKKTEVQTGGFSKESILPKRNSDKLIARKKDWDPKKYGGFDSPTVAYSVLVVAKVEKGKSKKLKSVKELLGITIMERSSFEKNPIDFLEAKGYKEVKKDLIIKLPKYSLFELENGRKRMLASAGELQKGNELALPSKYVNFLYLASHYEKLKGSPEDNEQKQLFVEQHKHYLDEIIEQISEFSKRVILADANLDKVLSAYNKHRDKPIREQAENIIHLFTLTNLGAPAAFKYFDTTIDRKRYTSTKEVLDATLIHQSITGLYETRIDLSQLGGDSGGSSGGSSGSETPGTSESATPESSGGSSGGSSKWESRFELKPGKWVFVPTDETIEQGREIKELIEKRWKAPSYYYHLRQGGHVAALKQHLGHTCFIHVDIEDFFGSINRSAITRALKGYFSYEEAREIATESTVRHPEDAERYILPFGFVQSPILASLCLRKSALGRYLHQLSKQDGVVVSVYVDDIIISGNDPERLEQVLEDIKAAAERSGFPLNEEKQQGPAETITAFNIELSQNSLEITPERMAEFRDAMQQSTNEHQREGILGYVRSVNPAQASGGSKRTADGSEFEPKKKRKV

SEQ ID NO: 1566 - protein, 1685 aa, synthetic construct
MKRTADGSEFESPKKKRKVDKKYSIGLDIGTNSVGWAVITDEYKVPSKKFKVLGNTDRHSIKKNLIGALLFDSGETAEATRLKRTARRRYTRRKNRICYLQEIFSNEMAKVDDSFFHRLEESFLVEEDKKHERHPIFGNIVDEVAYHEKYPTIYHLRKKLVDSTDKADLRLIYLALAHMIKFRGHFLIEGDLNPDNSDVDKLFIQLVQTYNQLFEENPINASGVDAKAILSARLSKSRRLENLIAQLPGEKKNGLFGNLIALSLGLTPNFKSNFDLAEDAKLQLSKDTYDDDLDNLLAQIGDQYADLFLAAKNLSDAILLSDILRVNTEITKAPLSASMIKRYDEHHQDLTLLKALVRQQLPEKYKEIFFDQSKNGYAGYIDGGASQEEFYKFIKPILEKMDGTEELLVKLNREDLLRKQRTFDNGSIPHQIHLGELHAILRRQEDFYPFLKDNREKIEKILTFRIPYYVGPLARGNSRFAWMTRKSEETITPWNFEEVVDKGASAQSFIERMTNFDKNLPNEKVLPKHSLLYEYFTVYNELTKVKYVTEGMRKPAFLSGEQKKAIVDLLFKTNRKVTVKQLKEDYFKKIECFDSVEISGVEDRFNASLGTYHDLLKIIKDKDFLDNEENEDILEDIVLTLTLFEDREMIEERLKTYAHLFDDKVMKQLKRRRYTGWGRLSRKLINGIRDKQSGKTILDFLKSDGFANRNFMQLIHDDSLTFKEDIQKAQVSGQGDSLHEHIANLAGSPAIKKGILQTVKVVDELVKVMGRHKPENIVIEMARENQTTQKGQKNSRERMKRIEEGIKELGSQILKEHPVENTQLQNEKLYLYYLQNGRDMYVDQELDINRLSDYDVDAIVPQSFLKDDSIDNKVLTRSDKNRGKSDNVPSEEVVKKMKNYWRQLLNAKLITQRKFDNLTKAERGGLSELDKAGFIKRQLVETRQITKHVAQILDSRMNTKYDENDKLIREVKVITLKSKLVSDFRKDFQFYKVREINNYHHAHDAYLNAVVGTALIKKYPKLESEFVYGDYKVYDVRKMIAKSEQEIGKATAKYFFYSNIMNFFKTEITLANGEIRKRPLIETNGETGEIVWDKGRDFATVRKVLSMPQVNIVKKTEVQTGGFSKESILPKRNSDKLIARKKDWDPKKYGGFDSPTVAYSVLVVAKVEKGKSKKLKSVKELLGITIMERSSFEKNPIDFLEAKGYKEVKKDLIIKLPKYSLFELENGRKRMLASAGELQKGNELALPSKYVNFLYLASHYEKLKGSPEDNEQKQLFVEQHKHYLDEIIEQISEFSKRVILADANLDKVLSAYNKHRDKPIREQAENIIHLFTLTNLGAPAAFKYFDTTIDRKRYTSTKEVLDATLIHQSITGLYETRIDLSQLGGDSGGSSGGSSGSETPGTSESATPESSGGSSGGSSKWESRFELKPGKWVFVPTDETIEQGREIKELIEKRWKAPSYYYHLRQGGHVAALKQHLGHTCFIHVDIEDFFGSINRSRITRALKGYFSYEEAREIATESTVRHPEDAERYILPFGFVQSPILASLCLRKSALGRYLHQLSKQDGVVVSVYVDDIIISGNDPERLEQVLEDIKAAAERSGFPLNEEKQQGPAETITAFNIELSQNSLEITPERAAEFRDAMQQSTNEHQREGILGYVRSVNPAQASGGSKRTADGSEFEPKKKRKV

SEQ ID NO: 1567 - protein, 1685 aa, synthetic construct
MKRTADGSEFESPKKKRKVDKKYSIGLDIGTNSVGWAVITDEYKVPSKKFKVLGNTDRHSIKKNLIGALLFDSGETAEATRLKRTARRRYTRRKNRICYLQEIFSNEMAKVDDSFFHRLEESFLVEEDKKHERHPIFGNIVDEVAYHEKYPTIYHLRKKLVDSTDKADLRLIYLALAHMIKFRGHFLIEGDLNPDNSDVDKLFIQLVQTYNQLFEENPINASGVDAKAILSARLSKSRRLENLIAQLPGEKKNGLFGNLIALSLGLTPNFKSNFDLAEDAKLQLSKDTYDDDLDNLLAQIGDQYADLFLAAKNLSDAILLSDILRVNTEITKAPLSASMIKRYDEHHQDLTLLKALVRQQLPEKYKEIFFDQSKNGYAGYIDGGASQEEFYKFIKPILEKMDGTEELLVKLNREDLLRKQRTFDNGSIPHQIHLGELHAILRRQEDFYPFLKDNREKIEKILTFRIPYYVGPLARGNSRFAWMTRKSEETITPWNFEEVVDKGASAQSFIERMTNFDKNLPNEKVLPKHSLLYEYFTVYNELTKVKYVTEGMRKPAFLSGEQKKAIVDLLFKTNRKVTVKQLKEDYFKKIECFDSVEISGVEDRFNASLGTYHDLLKIIKDKDFLDNEENEDILEDIVLTLTLFEDREMIEERLKTYAHLFDDKVMKQLKRRRYTGWGRLSRKLINGIRDKQSGKTILDFLKSDGFANRNFMQLIHDDSLTFKEDIQKAQVSGQGDSLHEHIANLAGSPAIKKGILQTVKVVDELVKVMGRHKPENIVIEMARENQTTQKGQKNSRERMKRIEEGIKELGSQILKEHPVENTQLQNEKLYLYYLQNGRDMYVDQELDINRLSDYDVDAIVPQSFLKDDSIDNKVLTRSDKNRGKSDNVPSEEVVKKMKNYWRQLLNAKLITQRKFDNLTKAERGGLSELDKAGFIKRQLVETRQITKHVAQILDSRMNTKYDENDKLIREVKVITLKSKLVSDFRKDFQFYKVREINNYHHAHDAYLNAVVGTALIKKYPKLESEFVYGDYKVYDVRKMIAKSEQEIGKATAKYFFYSNIMNFFKTEITLANGEIRKRPLIETNGETGEIVWDKGRDFATVRKVLSMPQVNIVKKTEVQTGGFSKESILPKRNSDKLIARKKDWDPKKYGGFDSPTVAYSVLVVAKVEKGKSKKLKSVKELLGITIMERSSFEKNPIDFLEAKGYKEVKKDLIIKLPKYSLFELENGRKRMLASAGELQKGNELALPSKYVNFLYLASHYEKLKGSPEDNEQKQLFVEQHKHYLDEIIEQISEFSKRVILADANLDKVLSAYNKHRDKPIREQAENIIHLFTLTNLGAPAAFKYFDTTIDRKRYTSTKEVLDATLIHQSITGLYETRIDLSQLGGDSGGSSGGSSGSETPGTSESATPESSGGSSGGSSKWESRFELKPGKWVFVPTDETIEQGREIKELIEKRWKAPSYYYHLRQGGHVAALKQHLGHTCFIHVDIEDFFGSINRSRITRALKGYFSYEEAREIATESTVRHPEDAERYILPFGFVQSPILASLCLRKSALGRYLHQLSKQDGVVVSVYVDDIIISGNDPERLEQVLEDIKAAAERSGFPLNEEKQQGPAETITAFNIELSQNSLEITPERMAEFRDAQQQSTNEHQREGILGYVRSVNPAQASGGSKRTADGSEFEPKKKRKV

SEQ ID NO: 1568 - protein, 1685 aa, synthetic construct
MKRTADGSEFESPKKKRKVDKKYSIGLDIGTNSVGWAVITDEYKVPSKKFKVLGNTDRHSIKKNLIGALLFDSGETAEATRLKRTARRRYTRRKNRICYLQEIFSNEMAKVDDSFFHRLEESFLVEEDKKHERHPIFGNIVDEVAYHEKYPTIYHLRKKLVDSTDKADLRLIYLALAHMIKFRGHFLIEGDLNPDNSDVDKLFIQLVQTYNQLFEENPINASGVDAKAILSARLSKSRRLENLIAQLPGEKKNGLFGNLIALSLGLTPNFKSNFDLAEDAKLQLSKDTYDDDLDNLLAQIGDQYADLFLAAKNLSDAILLSDILRVNTEITKAPLSASMIKRYDEHHQDLTLLKALVRQQLPEKYKEIFFDQSKNGYAGYIDGGASQEEFYKFIKPILEKMDGTEELLVKLNREDLLRKQRTFDNGSIPHQIHLGELHAILRRQEDFYPFLKDNREKIEKILTFRIPYYVGPLARGNSRFAWMTRKSEETITPWNFEEVVDKGASAQSFIERMTNFDKNLPNEKVLPKHSLLYEYFTVYNELTKVKYVTEGMRKPAFLSGEQKKAIVDLLFKTNRKVTVKQLKEDYFKKIECFDSVEISGVEDRFNASLGTYHDLLKIIKDKDFLDNEENEDILEDIVLTLTLFEDREMIEERLKTYAHLFDDKVMKQLKRRRYTGWGRLSRKLINGIRDKQSGKTILDFLKSDGFANRNFMQLIHDDSLTFKEDIQKAQVSGQGDSLHEHIANLAGSPAIKKGILQTVKVVDELVKVMGRHKPENIVIEMARENQTTQKGQKNSRERMKRIEEGIKELGSQILKEHPVENTQLQNEKLYLYYLQNGRDMYVDQELDINRLSDYDVDAIVPQSFLKDDSIDNKVLTRSDKNRGKSDNVPSEEVVKKMKNYWRQLLNAKLITQRKFDNLTKAERGGLSELDKAGFIKRQLVETRQITKHVAQILDSRMNTKYDENDKLIREVKVITLKSKLVSDFRKDFQFYKVREINNYHHAHDAYLNAVVGTALIKKYPKLESEFVYGDYKVYDVRKMIAKSEQEIGKATAKYFFYSNIMNFFKTEITLANGEIRKRPLIETNGETGEIVWDKGRDFATVRKVLSMPQVNIVKKTEVQTGGFSKESILPKRNSDKLIARKKDWDPKKYGGFDSPTVAYSVLVVAKVEKGKSKKLKSVKELLGITIMERSSFEKNPIDFLEAKGYKEVKKDLIIKLPKYSLFELENGRKRMLASAGELQKGNELALPSKYVNFLYLASHYEKLKGSPEDNEQKQLFVEQHKHYLDEIIEQISEFSKRVILADANLDKVLSAYNKHRDKPIREQAENIIHLFTLTNLGAPAAFKYFDTTIDRKRYTSTKEVLDATLIHQSITGLYETRIDLSQLGGDSGGSSGGSSGSETPGTSESATPESSGGSSGGSSKWESRRELKPGKWVFVPTDETIEQGREIKELIEKRWKAPSYYYHLRQGGHVAALKQHLGHTCFIHVDIEDFFGSINRSRITRALKGYFSYEEAREIATESTVRHPEDAERYILPFGFVQSPILASLCLRKSALGRYLHQLSKQDGVVVSVYVDDIIISGNDPERLEQVLEDIKAAAERSGFPLNEEKQQGPAETITAFNIELSQNSLEITPERMAEFRDAMQQSTNEHQREGILGYVRSVNPAQASGGSKRTADGSEFEPKKKRKV

SEQ ID NO: 1569 - protein, 1685 aa, synthetic construct
MKRTADGSEFESPKKKRKVDKKYSIGLDIGTNSVGWAVITDEYKVPSKKFKVLGNTDRHSIKKNLIGALLFDSGETAEATRLKRTARRRYTRRKNRICYLQEIFSNEMAKVDDSFFHRLEESFLVEEDKKHERHPIFGNIVDEVAYHEKYPTIYHLRKKLVDSTDKADLRLIYLALAHMIKFRGHFLIEGDLNPDNSDVDKLFIQLVQTYNQLFEENPINASGVDAKAILSARLSKSRRLENLIAQLPGEKKNGLFGNLIALSLGLTPNFKSNFDLAEDAKLQLSKDTYDDDLDNLLAQIGDQYADLFLAAKNLSDAILLSDILRVNTEITKAPLSASMIKRYDEHHQDLTLLKALVRQQLPEKYKEIFFDQSKNGYAGYIDGGASQEEFYKFIKPILEKMDGTEELLVKLNREDLLRKQRTFDNGSIPHQIHLGELHAILRRQEDFYPFLKDNREKIEKILTFRIPYYVGPLARGNSRFAWMTRKSEETITPWNFEEVVDKGASAQSFIERMTNFDKNLPNEKVLPKHSLLYEYFTVYNELTKVKYVTEGMRKPAFLSGEQKKAIVDLLFKTNRKVTVKQLKEDYFKKIECFDSVEISGVEDRFNASLGTYHDLLKIIKDKDFLDNEENEDILEDIVLTLTLFEDREMIEERLKTYAHLFDDKVMKQLKRRRYTGWGRLSRKLINGIRDKQSGKTILDFLKSDGFANRNFMQLIHDDSLTFKEDIQKAQVSGQGDSLHEHIANLAGSPAIKKGILQTVKVVDELVKVMGRHKPENIVIEMARENQTTQKGQKNSRERMKRIEEGIKELGSQILKEHPVENTQLQNEKLYLYYLQNGRDMYVDQELDINRLSDYDVDAIVPQSFLKDDSIDNKVLTRSDKNRGKSDNVPSEEVVKKMKNYWRQLLNAKLITQRKFDNLTKAERGGLSELDKAGFIKRQLVETRQITKHVAQILDSRMNTKYDENDKLIREVKVITLKSKLVSDFRKDFQFYKVREINNYHHAHDAYLNAVVGTALIKKYPKLESEFVYGDYKVYDVRKMIAKSEQEIGKATAKYFFYSNIMNFFKTEITLANGEIRKRPLIETNGETGEIVWDKGRDFATVRKVLSMPQVNIVKKTEVQTGGFSKESILPKRNSDKLIARKKDWDPKKYGGFDSPTVAYSVLVVAKVEKGKSKKLKSVKELLGITIMERSSFEKNPIDFLEAKGYKEVKKDLIIKLPKYSLFELENGRKRMLASAGELQKGNELALPSKYVNFLYLASHYEKLKGSPEDNEQKQLFVEQHKHYLDEIIEQISEFSKRVILADANLDKVLSAYNKHRDKPIREQAENIIHLFTLTNLGAPAAFKYFDTTIDRKRYTSTKEVLDATLIHQSITGLYETRIDLSQLGGDSGGSSGGSSGSETPGTSESATPESSGGSSGGSSKWESRFELKPGKWVFVPTDETIEQGREIKELIEKRWKAPSYYYHLRQGGHVAALKQHLGHTCFIHVDIEDFFGSINRDRITRALKGYFSYEEAREIATESTVRHPEDAERYILPFGFVQSPILASLCLRKSALGRYLHQLSKQDGVVVSVYVDDIIISGNDPERLEQVLEDIKAAAERSGFPLNEEKQQGPAETITAFNIELSQNSLEITPERMAEFRDAMQQSTNEHQREGILGYVRSVNPAQASGGSKRTADGSEFEPKKKRKV

SEQ ID NO: 1570 - protein, 1685 aa, synthetic construct
MKRTADGSEFESPKKKRKVDKKYSIGLDIGTNSVGWAVITDEYKVPSKKFKVLGNTDRHSIKKNLIGALLFDSGETAEATRLKRTARRRYTRRKNRICYLQEIFSNEMAKVDDSFFHRLEESFLVEEDKKHERHPIFGNIVDEVAYHEKYPTIYHLRKKLVDSTDKADLRLIYLALAHMIKFRGHFLIEGDLNPDNSDVDKLFIQLVQTYNQLFEENPINASGVDAKAILSARLSKSRRLENLIAQLPGEKKNGLFGNLIALSLGLTPNFKSNFDLAEDAKLQLSKDTYDDDLDNLLAQIGDQYADLFLAAKNLSDAILLSDILRVNTEITKAPLSASMIKRYDEHHQDLTLLKALVRQQLPEKYKEIFFDQSKNGYAGYIDGGASQEEFYKFIKPILEKMDGTEELLVKLNREDLLRKQRTFDNGSIPHQIHLGELHAILRRQEDFYPFLKDNREKIEKILTFRIPYYVGPLARGNSRFAWMTRKSEETITPWNFEEVVDKGASAQSFIERMTNFDKNLPNEKVLPKHSLLYEYFTVYNELTKVKYVTEGMRKPAFLSGEQKKAIVDLLFKTNRKVTVKQLKEDYFKKIECFDSVEISGVEDRFNASLGTYHDLLKIIKDKDFLDNEENEDILEDIVLTLTLFEDREMIEERLKTYAHLFDDKVMKQLKRRRYTGWGRLSRKLINGIRDKQSGKTILDFLKSDGFANRNFMQLIHDDSLTFKEDIQKAQVSGQGDSLHEHIANLAGSPAIKKGILQTVKVVDELVKVMGRHKPENIVIEMARENQTTQKGQKNSRERMKRIEEGIKELGSQILKEHPVENTQLQNEKLYLYYLQNGRDMYVDQELDINRLSDYDVDAIVPQSFLKDDSIDNKVLTRSDKNRGKSDNVPSEEVVKKMKNYWRQLLNAKLITQRKFDNLTKAERGGLSELDKAGFIKRQLVETRQITKHVAQILDSRMNTKYDENDKLIREVKVITLKSKLVSDFRKDFQFYKVREINNYHHAHDAYLNAVVGTALIKKYPKLESEFVYGDYKVYDVRKMIAKSEQEIGKATAKYFFYSNIMNFFKTEITLANGEIRKRPLIETNGETGEIVWDKGRDFATVRKVLSMPQVNIVKKTEVQTGGFSKESILPKRNSDKLIARKKDWDPKKYGGFDSPTVAYSVLVVAKVEKGKSKKLKSVKELLGITIMERSSFEKNPIDFLEAKGYKEVKKDLIIKLPKYSLFELENGRKRMLASAGELQKGNELALPSKYVNFLYLASHYEKLKGSPEDNEQKQLFVEQHKHYLDEIIEQISEFSKRVILADANLDKVLSAYNKHRDKPIREQAENIIHLFTLTNLGAPAAFKYFDTTIDRKRYTSTKEVLDATLIHQSITGLYETRIDLSQLGGDSGGSSGGSSGSETPGTSESATPESSGGSSGGSSKWESRFELKPGKWVFVPTDETIEQGREIKELIEKRWKAPSYYYHLRQGGHVAALKQHLGHTCFIHVDIEDFFGSINRSSITRALKGYFSYEEAPEIATESTVRHPEDAERYILPFGFVQSPILASLCLRKSALGRYLHQLSKQDGVVVSVYVDDIIISGNDPERLEQVLEDIKAAAEESGFPLNEEKQQGPAETITAFNIELSQNSLEITPERMAEFRDARQQSTNEHQREGILGYVRSVNPAQASGGSKRTADGSEFEPKKKRKV

SEQ ID NO: 1571 - protein, 1685 aa, synthetic construct
MKRTADGSEFESPKKKRKVDKKYSIGLDIGTNSVGWAVITDEYKVPSKKFKVLGNTDRHSIKKNLIGALLFDSGETAEATRLKRTARRRYTRRKNRICYLQEIFSNEMAKVDDSFFHRLEESFLVEEDKKHERHPIFGNIVDEVAYHEKYPTIYHLRKKLVDSTDKADLRLIYLALAHMIKFRGHFLIEGDLNPDNSDVDKLFIQLVQTYNQLFEENPINASGVDAKAILSARLSKSRRLENLIAQLPGEKKNGLFGNLIALSLGLTPNFKSNFDLAEDAKLQLSKDTYDDDLDNLLAQIGDQYADLFLAAKNLSDAILLSDILRVNTEITKAPLSASMIKRYDEHHQDLTLLKALVRQQLPEKYKEIFFDQSKNGYAGYIDGGASQEEFYKFIKPILEKMDGTEELLVKLNREDLLRKQRTFDNGSIPHQIHLGELHAILRRQEDFYPFLKDNREKIEKILTFRIPYYVGPLARGNSRFAWMTRKSEETITPWNFEEVVDKGASAQSFIERMTNFDKNLPNEKVLPKHSLLYEYFTVYNELTKVKYVTEGMRKPAFLSGEQKKAIVDLLFKTNRKVTVKQLKEDYFKKIECFDSVEISGVEDRFNASLGTYHDLLKIIKDKDFLDNEENEDILEDIVLTLTLFEDREMIEERLKTYAHLFDDKVMKQLKRRRYTGWGRLSRKLINGIRDKQSGKTILDFLKSDGFANRNFMQLIHDDSLTFKEDIQKAQVSGQGDSLHEHIANLAGSPAIKKGILQTVKVVDELVKVMGRHKPENIVIEMARENQTTQKGQKNSRERMKRIEEGIKELGSQILKEHPVENTQLQNEKLYLYYLQNGRDMYVDQELDINRLSDYDVDAIVPQSFLKDDSIDNKVLTRSDKNRGKSDNVPSEEVVKKMKNYWRQLLNAKLITQRKFDNLTKAERGGLSELDKAGFIKRQLVETRQITKHVAQILDSRMNTKYDENDKLIREVKVITLKSKLVSDFRKDFQFYKVREINNYHHAHDAYLNAVVGTALIKKYPKLESEFVYGDYKVYDVRKMIAKSEQEIGKATAKYFFYSNIMNFFKTEITLANGEIRKRPLIETNGETGEIVWDKGRDFATVRKVLSMPQVNIVKKTEVQTGGFSKESILPKRNSDKLIARKKDWDPKKYGGFDSPTVAYSVLVVAKVEKGKSKKLKSVKELLGITIMERSSFEKNPIDFLEAKGYKEVKKDLIIKLPKYSLFELENGRKRMLASAGELQKGNELALPSKYVNFLYLASHYEKLKGSPEDNEQKQLFVEQHKHYLDEIIEQISEFSKRVILADANLDKVLSAYNKHRDKPIREQAENIIHLFTLTNLGAPAAFKYFDTTIDRKRYTSTKEVLDATLIHQSITGLYETRIDLSQLGGDSGGSSGGSSGSETPGTSESATPESSGGSSGGSSKWESRFELKPGKWVFVPTDETIEQGREIKELIEKRWKAPSYYYHLRQGGHVAALKQHLGHTCFIHVDIEDFFGSINRSRITRALKGYFSYEEAREIATESTVRHPEDAERYILPFGFVQSPILASLCLRKSALGRYLHQLSKQDGVVVSVYVDDIIISGNDPERLEQVLEDIKAAAEPSGFPLNEEKQQGPAETITAFNIELSQNSLEITPERMAEFRDAMQQSTNEHQREGILGYVRSVNPAQASGGSKRTADGSEFEPKKKRKV

SEQ ID NO: 1572 - protein, 1685 aa, synthetic construct
MKRTADGSEFESPKKKRKVDKKYSIGLDIGTNSVGWAVITDEYKVPSKKFKVLGNTDRHSIKKNLIGALLFDSGETAEATRLKRTARRRYTRRKNRICYLQEIFSNEMAKVDDSFFHRLEESFLVEEDKKHERHPIFGNIVDEVAYHEKYPTIYHLRKKLVDSTDKADLRLIYLALAHMIKFRGHFLIEGDLNPDNSDVDKLFIQLVQTYNQLFEENPINASGVDAKAILSARLSKSRRLENLIAQLPGEKKNGLFGNLIALSLGLTPNFKSNFDLAEDAKLQLSKDTYDDDLDNLLAQIGDQYADLFLAAKNLSDAILLSDILRVNTEITKAPLSASMIKRYDEHHQDLTLLKALVRQQLPEKYKEIFFDQSKNGYAGYIDGGASQEEFYKFIKPILEKMDGTEELLVKLNREDLLRKQRTFDNGSIPHQIHLGELHAILRRQEDFYPFLKDNREKIEKILTFRIPYYVGPLARGNSRFAWMTRKSEETITPWNFEEVVDKGASAQSFIERMTNFDKNLPNEKVLPKHSLLYEYFTVYNELTKVKYVTEGMRKPAFLSGEQKKAIVDLLFKTNRKVTVKQLKEDYFKKIECFDSVEISGVEDRFNASLGTYHDLLKIIKDKDFLDNEENEDILEDIVLTLTLFEDREMIEERLKTYAHLFDDKVMKQLKRRRYTGWGRLSRKLINGIRDKQSGKTILDFLKSDGFANRNFMQLIHDDSLTFKEDIQKAQVSGQGDSLHEHIANLAGSPAIKKGILQTVKVVDELVKVMGRHKPENIVIEMARENQTTQKGQKNSRERMKRIEEGIKELGSQILKEHPVENTQLQNEKLYLYYLQNGRDMYVDQELDINRLSDYDVDAIVPQSFLKDDSIDNKVLTRSDKNRGKSDNVPSEEVVKKMKNYWRQLLNAKLITQRKFDNLTKAERGGLSELDKAGFIKRQLVETRQITKHVAQILDSRMNTKYDENDKLIREVKVITLKSKLVSDFRKDFQFYKVREINNYHHAHDAYLNAVVGTALIKKYPKLESEFVYGDYKVYDVRKMIAKSEQEIGKATAKYFFYSNIMNFFKTEITLANGEIRKRPLIETNGETGEIVWDKGRDFATVRKVLSMPQVNIVKKTEVQTGGFSKESILPKRNSDKLIARKKDWDPKKYGGFDSPTVAYSVLVVAKVEKGKSKKLKSVKELLGITIMERSSFEKNPIDFLEAKGYKEVKKDLIIKLPKYSLFELENGRKRMLASAGELQKGNELALPSKYVNFLYLASHYEKLKGSPEDNEQKQLFVEQHKHYLDEIIEQISEFSKRVILADANLDKVLSAYNKHRDKPIREQAENIIHLFTLTNLGAPAAFKYFDTTIDRKRYTSTKEVLDATLIHQSITGLYETRIDLSQLGGDSGGSSGGSSGSETPGTSESATPESSGGSSGGSSKWESRFELKPGKWVFVPTDETIEQGREIKELIEKRWKAPSYYYHLRQGGHVAALKQHLGHTCFIHVDIEDFFGSINRSIITRALKGYFSYEEAREIATESTVRHPEDAERYILPFGFVQSPILASLCLRKSALGRYLHQLSKQDGVVVSVYVDDIIISGNDPERLEQVLEDIKAAAEESGFPLNEEKQQGPAETITAFNIELSQNSLEITPERMAEFRDARQQSTNEHQREGILGYVRSVNPAQASGGSKRTADGSEFEPKKKRKV

SEQ ID NO: 1573 - protein, 1685 aa, synthetic construct
MKRTADGSEFESPKKKRKVDKKYSIGLDIGTNSVGWAVITDEYKVPSKKFKVLGNTDRHSIKKNLIGALLFDSGETAEATRLKRTARRRYTRRKNRICYLQEIFSNEMAKVDDSFFHRLEESFLVEEDKKHERHPIFGNIVDEVAYHEKYPTIYHLRKKLVDSTDKADLRLIYLALAHMIKFRGHFLIEGDLNPDNSDVDKLFIQLVQTYNQLFEENPINASGVDAKAILSARLSKSRRLENLIAQLPGEKKNGLFGNLIALSLGLTPNFKSNFDLAEDAKLQLSKDTYDDDLDNLLAQIGDQYADLFLAAKNLSDAILLSDILRVNTEITKAPLSASMIKRYDEHHQDLTLLKALVRQQLPEKYKEIFFDQSKNGYAGYIDGGASQEEFYKFIKPILEKMDGTEELLVKLNREDLLRKQRTFDNGSIPHQIHLGELHAILRRQEDFYPFLKDNREKIEKILTFRIPYYVGPLARGNSRFAWMTRKSEETITPWNFEEVVDKGASAQSFIERMTNFDKNLPNEKVLPKHSLLYEYFTVYNELTKVKYVTEGMRKPAFLSGEQKKAIVDLLFKTNRKVTVKQLKEDYFKKIECFDSVEISGVEDRFNASLGTYHDLLKIIKDKDFLDNEENEDILEDIVLTLTLFEDREMIEERLKTYAHLFDDKVMKQLKRRRYTGWGRLSRKLINGIRDKQSGKTILDFLKSDGFANRNFMQLIHDDSLTFKEDIQKAQVSGQGDSLHEHIANLAGSPAIKKGILQTVKVVDELVKVMGRHKPENIVIEMARENQTTQKGQKNSRERMKRIEEGIKELGSQILKEHPVENTQLQNEKLYLYYLQNGRDMYVDQELDINRLSDYDVDAIVPQSFLKDDSIDNKVLTRSDKNRGKSDNVPSEEVVKKMKNYWRQLLNAKLITQRKFDNLTKAERGGLSELDKAGFIKRQLVETRQITKHVAQILDSRMNTKYDENDKLIREVKVITLKSKLVSDFRKDFQFYKVREINNYHHAHDAYLNAVVGTALIKKYPKLESEFVYGDYKVYDVRKMIAKSEQEIGKATAKYFFYSNIMNFFKTEITLANGEIRKRPLIETNGETGEIVWDKGRDFATVRKVLSMPQVNIVKKTEVQTGGFSKESILPKRNSDKLIARKKDWDPKKYGGFDSPTVAYSVLVVAKVEKGKSKKLKSVKELLGITIMERSSFEKNPIDFLEAKGYKEVKKDLIIKLPKYSLFELENGRKRMLASAGELQKGNELALPSKYVNFLYLASHYEKLKGSPEDNEQKQLFVEQHKHYLDEIIEQISEFSKRVILADANLDKVLSAYNKHRDKPIREQAENIIHLFTLTNLGAPAAFKYFDTTIDRKRYTSTKEVLDATLIHQSITGLYETRIDLSQLGGDSGGSSGGSSGSETPGTSESATPESSGGSSGGSSKWESRFELKPGKWVFVPTDETIEQGREIKELIEKRWKAPSYYYHLRQGGHVAALKQHLGHTCFIHVDIEDFFGSINRSRITRALKGYFSYEEAREIATESTVRHPEDAERYILPFGFVQSPILASLCLRKSALGRYLHQLSKQDGVVVSVYVDDIIISGNDPERLEQVLEDIKAAAEESGFPLNEEKQQGPAETITAFNIELSQNSLEITPERHAEFRDAMQQSTNEHQREGILGYVRSVNPAQASGGSKRTADGSEFEPKKKRKV

SEQ ID NO: 1574 - protein, 1685 aa, synthetic construct
MKRTADGSEFESPKKKRKVDKKYSIGLDIGTNSVGWAVITDEYKVPSKKFKVLGNTDRHSIKKNLIGALLFDSGETAEATRLKRTARRRYTRRKNRICYLQEIFSNEMAKVDDSFFHRLEESFLVEEDKKHERHPIFGNIVDEVAYHEKYPTIYHLRKKLVDSTDKADLRLIYLALAHMIKFRGHFLIEGDLNPDNSDVDKLFIQLVQTYNQLFEENPINASGVDAKAILSARLSKSRRLENLIAQLPGEKKNGLFGNLIALSLGLTPNFKSNFDLAEDAKLQLSKDTYDDDLDNLLAQIGDQYADLFLAAKNLSDAILLSDILRVNTEITKAPLSASMIKRYDEHHQDLTLLKALVRQQLPEKYKEIFFDQSKNGYAGYIDGGASQEEFYKFIKPILEKMDGTEELLVKLNREDLLRKQRTFDNGSIPHQIHLGELHAILRRQEDFYPFLKDNREKIEKILTFRIPYYVGPLARGNSRFAWMTRKSEETITPWNFEEVVDKGASAQSFIERMTNFDKNLPNEKVLPKHSLLYEYFTVYNELTKVKYVTEGMRKPAFLSGEQKKAIVDLLFKTNRKVTVKQLKEDYFKKIECFDSVEISGVEDRFNASLGTYHDLLKIIKDKDFLDNEENEDILEDIVLTLTLFEDREMIEERLKTYAHLFDDKVMKQLKRRRYTGWGRLSRKLINGIRDKQSGKTILDFLKSDGFANRNFMQLIHDDSLTFKEDIQKAQVSGQGDSLHEHIANLAGSPAIKKGILQTVKVVDELVKVMGRHKPENIVIEMARENQTTQKGQKNSRERMKRIEEGIKELGSQILKEHPVENTQLQNEKLYLYYLQNGRDMYVDQELDINRLSDYDVDAIVPQSFLKDDSIDNKVLTRSDKNRGKSDNVPSEEVVKKMKNYWRQLLNAKLITQRKFDNLTKAERGGLSELDKAGFIKRQLVETRQITKHVAQILDSRMNTKYDENDKLIREVKVITLKSKLVSDFRKDFQFYKVREINNYHHAHDAYLNAVVGTALIKKYPKLESEFVYGDYKVYDVRKMIAKSEQEIGKATAKYFFYSNIMNFFKTEITLANGEIRKRPLIETNGETGEIVWDKGRDFATVRKVLSMPQVNIVKKTEVQTGGFSKESILPKRNSDKLIARKKDWDPKKYGGFDSPTVAYSVLVVAKVEKGKSKKLKSVKELLGITIMERSSFEKNPIDFLEAKGYKEVKKDLIIKLPKYSLFELENGRKRMLASAGELQKGNELALPSKYVNFLYLASHYEKLKGSPEDNEQKQLFVEQHKHYLDEIIEQISEFSKRVILADANLDKVLSAYNKHRDKPIREQAENIIHLFTLTNLGAPAAFKYFDTTIDRKRYTSTKEVLDATLIHQSITGLYETRIDLSQLGGDSGGSSGGSSGSETPGTSESATPESSGGSSGGSSKWESRFELKPGKWVFVPTDETIEQGREIKELIEKRWKAPSYYYHLRQGGHVAALKQHLGHTCFIHVDIEDFFGSINRSRITRALKGYFSAEEAREIATESTVRHPEDAERYILPFGFVQSPILASLCLRKSALGRYLHQLSKQDGVVVSVYVDDIIISGNDPERLEQVLEDIKAAAEESGFPLNEEKQQGPAETITAFNIELSQNSLEITPERHAEFRDAMQQSTNEHQREGILGYVRSVNPAQASGGSKRTADGSEFEPKKKRKV

SEQ ID NO: 1575 - protein, 1685 aa, synthetic construct
MKRTADGSEFESPKKKRKVDKKYSIGLDIGTNSVGWAVITDEYKVPSKKFKVLGNTDRHSIKKNLIGALLFDSGETAEATRLKRTARRRYTRRKNRICYLQEIFSNEMAKVDDSFFHRLEESFLVEEDKKHERHPIFGNIVDEVAYHEKYPTIYHLRKKLVDSTDKADLRLIYLALAHMIKFRGHFLIEGDLNPDNSDVDKLFIQLVQTYNQLFEENPINASGVDAKAILSARLSKSRRLENLIAQLPGEKKNGLFGNLIALSLGLTPNFKSNFDLAEDAKLQLSKDTYDDDLDNLLAQIGDQYADLFLAAKNLSDAILLSDILRVNTEITKAPLSASMIKRYDEHHQDLTLLKALVRQQLPEKYKEIFFDQSKNGYAGYIDGGASQEEFYKFIKPILEKMDGTEELLVKLNREDLLRKQRTFDNGSIPHQIHLGELHAILRRQEDFYPFLKDNREKIEKILTFRIPYYVGPLARGNSRFAWMTRKSEETITPWNFEEVVDKGASAQSFIERMTNFDKNLPNEKVLPKHSLLYEYFTVYNELTKVKYVTEGMRKPAFLSGEQKKAIVDLLFKTNRKVTVKQLKEDYFKKIECFDSVEISGVEDRFNASLGTYHDLLKIIKDKDFLDNEENEDILEDIVLTLTLFEDREMIEERLKTYAHLFDDKVMKQLKRRRYTGWGRLSRKLINGIRDKQSGKTILDFLKSDGFANRNFMQLIHDDSLTFKEDIQKAQVSGQGDSLHEHIANLAGSPAIKKGILQTVKVVDELVKVMGRHKPENIVIEMARENQTTQKGQKNSRERMKRIEEGIKELGSQILKEHPVENTQLQNEKLYLYYLQNGRDMYVDQELDINRLSDYDVDAIVPQSFLKDDSIDNKVLTRSDKNRGKSDNVPSEEVVKKMKNYWRQLLNAKLITQRKFDNLTKAERGGLSELDKAGFIKRQLVETRQITKHVAQILDSRMNTKYDENDKLIREVKVITLKSKLVSDFRKDFQFYKVREINNYHHAHDAYLNAVVGTALIKKYPKLESEFVYGDYKVYDVRKMIAKSEQEIGKATAKYFFYSNIMNFFKTEITLANGEIRKRPLIETNGETGEIVWDKGRDFATVRKVLSMPQVNIVKKTEVQTGGFSKESILPKRNSDKLIARKKDWDPKKYGGFDSPTVAYSVLVVAKVEKGKSKKLKSVKELLGITIMERSSFEKNPIDFLEAKGYKEVKKDLIIKLPKYSLFELENGRKRMLASAGELQKGNELALPSKYVNFLYLASHYEKLKGSPEDNEQKQLFVEQHKHYLDEIIEQISEFSKRVILADANLDKVLSAYNKHRDKPIREQAENIIHLFTLTNLGAPAAFKYFDTTIDRKRYTSTKEVLDATLIHQSITGLYETRIDLSQLGGDSGGSSGGSSGSETPGTSESATPESSGGSSGGSSKWESRFELKPGKWVFVPTDETIEQGREIKELIEKHWKAPSYYYHLRQGGHVAALKQHLGHTCFIHVDIEDFFGSINRSDITRALKGYFSYEEAREIATESTVRHPEDAERYILPFGFVQSPILASLCLRKSALGRYLHQLSKQDGVVVSVYVDDIIISGNDPERLEQVLEDIKAAAEESGFPLNEEKQQGPAETITAFNIELSQNSLEITPERHAEFRDAMQQSTNEHQREGILGYVRSVNPAQASGGSKRTADGSEFEPKKKRKV

SEQ ID NO: 1576 - protein, 1685 aa, synthetic construct
MKRTADGSEFESPKKKRKVDKKYSIGLDIGTNSVGWAVITDEYKVPSKKFKVLGNTDRHSIKKNLIGALLFDSGETAEATRLKRTARRRYTRRKNRICYLQEIFSNEMAKVDDSFFHRLEESFLVEEDKKHERHPIFGNIVDEVAYHEKYPTIYHLRKKLVDSTDKADLRLIYLALAHMIKFRGHFLIEGDLNPDNSDVDKLFIQLVQTYNQLFEENPINASGVDAKAILSARLSKSRRLENLIAQLPGEKKNGLFGNLIALSLGLTPNFKSNFDLAEDAKLQLSKDTYDDDLDNLLAQIGDQYADLFLAAKNLSDAILLSDILRVNTEITKAPLSASMIKRYDEHHQDLTLLKALVRQQLPEKYKEIFFDQSKNGYAGYIDGGASQEEFYKFIKPILEKMDGTEELLVKLNREDLLRKQRTFDNGSIPHQIHLGELHAILRRQEDFYPFLKDNREKIEKILTFRIPYYVGPLARGNSRFAWMTRKSEETITPWNFEEVVDKGASAQSFIERMTNFDKNLPNEKVLPKHSLLYEYFTVYNELTKVKYVTEGMRKPAFLSGEQKKAIVDLLFKTNRKVTVKQLKEDYFKKIECFDSVEISGVEDRFNASLGTYHDLLKIIKDKDFLDNEENEDILEDIVLTLTLFEDREMIEERLKTYAHLFDDKVMKQLKRRRYTGWGRLSRKLINGIRDKQSGKTILDFLKSDGFANRNFMQLIHDDSLTFKEDIQKAQVSGQGDSLHEHIANLAGSPAIKKGILQTVKVVDELVKVMGRHKPENIVIEMARENQTTQKGQKNSRERMKRIEEGIKELGSQILKEHPVENTQLQNEKLYLYYLQNGRDMYVDQELDINRLSDYDVDAIVPQSFLKDDSIDNKVLTRSDKNRGKSDNVPSEEVVKKMKNYWRQLLNAKLITQRKFDNLTKAERGGLSELDKAGFIKRQLVETRQITKHVAQILDSRMNTKYDENDKLIREVKVITLKSKLVSDFRKDFQFYKVREINNYHHAHDAYLNAVVGTALIKKYPKLESEFVYGDYKVYDVRKMIAKSEQEIGKATAKYFFYSNIMNFFKTEITLANGEIRKRPLIETNGETGEIVWDKGRDFATVRKVLSMPQVNIVKKTEVQTGGFSKESILPKRNSDKLIARKKDWDPKKYGGFDSPTVAYSVLVVAKVEKGKSKKLKSVKELLGITIMERSSFEKNPIDFLEAKGYKEVKKDLIIKLPKYSLFELENGRKRMLASAGELQKGNELALPSKYVNFLYLASHYEKLKGSPEDNEQKQLFVEQHKHYLDEIIEQISEFSKRVILADANLDKVLSAYNKHRDKPIREQAENIIHLFTLTNLGAPAAFKYFDTTIDRKRYTSTKEVLDATLIHQSITGLYETRIDLSQLGGDSGGSSGGSSGSETPGTSESATPESSGGSSGGSSKWESRFELKPGKWVFVPTDETIEQGREIKELIEKPWKAPSYYYHLRQGGHVAALKQHLGHTCFIHVDIEDFFGSINRSIITRALKGYFSYEEAREIATESTVRHPEDAERYILPFGFVQSPILASLCLRKSALGRYLHQLSKQDGVVVSVYVDDIIISGNDPERLEQVLEDIKAAAEESGFPLNEEKQQGPAETITAFNIELSQNSLEITPERTAEFRDAMQQSTNEHQREGILGYVRSVNPAQASGGSKRTADGSEFEPKKKRKV

SEQ ID NO: 1577 - protein, 1685 aa, synthetic construct
MKRTADGSEFESPKKKRKVDKKYSIGLDIGTNSVGWAVITDEYKVPSKKFKVLGNTDRHSIKKNLIGALLFDSGETAEATRLKRTARRRYTRRKNRICYLQEIFSNEMAKVDDSFFHRLEESFLVEEDKKHERHPIFGNIVDEVAYHEKYPTIYHLRKKLVDSTDKADLRLIYLALAHMIKFRGHFLIEGDLNPDNSDVDKLFIQLVQTYNQLFEENPINASGVDAKAILSARLSKSRRLENLIAQLPGEKKNGLFGNLIALSLGLTPNFKSNFDLAEDAKLQLSKDTYDDDLDNLLAQIGDQYADLFLAAKNLSDAILLSDILRVNTEITKAPLSASMIKRYDEHHQDLTLLKALVRQQLPEKYKEIFFDQSKNGYAGYIDGGASQEEFYKFIKPILEKMDGTEELLVKLNREDLLRKQRTFDNGSIPHQIHLGELHAILRRQEDFYPFLKDNREKIEKILTFRIPYYVGPLARGNSRFAWMTRKSEETITPWNFEEVVDKGASAQSFIERMTNFDKNLPNEKVLPKHSLLYEYFTVYNELTKVKYVTEGMRKPAFLSGEQKKAIVDLLFKTNRKVTVKQLKEDYFKKIECFDSVEISGVEDRFNASLGTYHDLLKIIKDKDFLDNEENEDILEDIVLTLTLFEDREMIEERLKTYAHLFDDKVMKQLKRRRYTGWGRLSRKLINGIRDKQSGKTILDFLKSDGFANRNFMQLIHDDSLTFKEDIQKAQVSGQGDSLHEHIANLAGSPAIKKGILQTVKVVDELVKVMGRHKPENIVIEMARENQTTQKGQKNSRERMKRIEEGIKELGSQILKEHPVENTQLQNEKLYLYYLQNGRDMYVDQELDINRLSDYDVDAIVPQSFLKDDSIDNKVLTRSDKNRGKSDNVPSEEVVKKMKNYWRQLLNAKLITQRKFDNLTKAERGGLSELDKAGFIKRQLVETRQITKHVAQILDSRMNTKYDENDKLIREVKVITLKSKLVSDFRKDFQFYKVREINNYHHAHDAYLNAVVGTALIKKYPKLESEFVYGDYKVYDVRKMIAKSEQEIGKATAKYFFYSNIMNFFKTEITLANGEIRKRPLIETNGETGEIVWDKGRDFATVRKVLSMPQVNIVKKTEVQTGGFSKESILPKRNSDKLIARKKDWDPKKYGGFDSPTVAYSVLVVAKVEKGKSKKLKSVKELLGITIMERSSFEKNPIDFLEAKGYKEVKKDLIIKLPKYSLFELENGRKRMLASAGELQKGNELALPSKYVNFLYLASHYEKLKGSPEDNEQKQLFVEQHKHYLDEIIEQISEFSKRVILADANLDKVLSAYNKHRDKPIREQAENIIHLFTLTNLGAPAAFKYFDTTIDRKRYTSTKEVLDATLIHQSITGLYETRIDLSQLGGDSGGSSGGSSGSETPGTSESATPESSGGSSGGSSKWESRFELKPGKWVFVPTDETIEQGREIKELIEKPWKAPSYYYHLRQGGHVAALKQHLGHTCFIHVDIEDFFGSINRSRITRALKGYFSYEEAREIATESTVRHPEDAERYILPFGFVQSPILASLCLRKSALGRYLHQLSKQDGVVVSVYVDDIIISGNDPERLEQVLEDIKAAAEESGFPLNEEKQQGPAETITAFNIELSQNSLEITPERTAEFRDAMQQSTNEHQREGILGYVRSVNPAQASGGSKRTADGSEFEPKKKRKV

SEQ ID NO: 1578 - protein, 1685 aa, synthetic construct
MKRTADGSEFESPKKKRKVDKKYSIGLDIGTNSVGWAVITDEYKVPSKKFKVLGNTDRHSIKKNLIGALLFDSGETAEATRLKRTARRRYTRRKNRICYLQEIFSNEMAKVDDSFFHRLEESFLVEEDKKHERHPIFGNIVDEVAYHEKYPTIYHLRKKLVDSTDKADLRLIYLALAHMIKFRGHFLIEGDLNPDNSDVDKLFIQLVQTYNQLFEENPINASGVDAKAILSARLSKSRRLENLIAQLPGEKKNGLFGNLIALSLGLTPNFKSNFDLAEDAKLQLSKDTYDDDLDNLLAQIGDQYADLFLAAKNLSDAILLSDILRVNTEITKAPLSASMIKRYDEHHQDLTLLKALVRQQLPEKYKEIFFDQSKNGYAGYIDGGASQEEFYKFIKPILEKMDGTEELLVKLNREDLLRKQRTFDNGSIPHQIHLGELHAILRRQEDFYPFLKDNREKIEKILTFRIPYYVGPLARGNSRFAWMTRKSEETITPWNFEEVVDKGASAQSFIERMTNFDKNLPNEKVLPKHSLLYEYFTVYNELTKVKYVTEGMRKPAFLSGEQKKAIVDLLFKTNRKVTVKQLKEDYFKKIECFDSVEISGVEDRFNASLGTYHDLLKIIKDKDFLDNEENEDILEDIVLTLTLFEDREMIEERLKTYAHLFDDKVMKQLKRRRYTGWGRLSRKLINGIRDKQSGKTILDFLKSDGFANRNFMQLIHDDSLTFKEDIQKAQVSGQGDSLHEHIANLAGSPAIKKGILQTVKVVDELVKVMGRHKPENIVIEMARENQTTQKGQKNSRERMKRIEEGIKELGSQILKEHPVENTQLQNEKLYLYYLQNGRDMYVDQELDINRLSDYDVDAIVPQSFLKDDSIDNKVLTRSDKNRGKSDNVPSEEVVKKMKNYWRQLLNAKLITQRKFDNLTKAERGGLSELDKAGFIKRQLVETRQITKHVAQILDSRMNTKYDENDKLIREVKVITLKSKLVSDFRKDFQFYKVREINNYHHAHDAYLNAVVGTALIKKYPKLESEFVYGDYKVYDVRKMIAKSEQEIGKATAKYFFYSNIMNFFKTEITLANGEIRKRPLIETNGETGEIVWDKGRDFATVRKVLSMPQVNIVKKTEVQTGGFSKESILPKRNSDKLIARKKDWDPKKYGGFDSPTVAYSVLVVAKVEKGKSKKLKSVKELLGITIMERSSFEKNPIDFLEAKGYKEVKKDLIIKLPKYSLFELENGRKRMLASAGELQKGNELALPSKYVNFLYLASHYEKLKGSPEDNEQKQLFVEQHKHYLDEIIEQISEFSKRVILADANLDKVLSAYNKHRDKPIREQAENIIHLFTLTNLGAPAAFKYFDTTIDRKRYTSTKEVLDATLIHQSITGLYETRIDLSQLGGDSGGSSGGSSGSETPGTSESATPESSGGSSGGSSKWESRFELKPGKWVFVPTDETIEQGREIKELIEKRWKAPSYYYHLRQGGHVAALKQHLGHTCFIHVDIEDFFGSINRSYITRALKGYFSPEEAREIATESTVRHPEDAERYILPFGFVQSPILASLCLRKSALGRYLHQLSKQDGVVVSVYVDDIIISGNDPERLEQVLEDIKAAAERSGFPLNEEKQQGPAETITAFNIELSQNSLEITPERMAEFRDARQQSTNEHQREGILGYVRSVNPAQASGGSKRTADGSEFEPKKKRKV

SEQ ID NO: 1579 - protein, 1685 aa, synthetic construct
MKRTADGSEFESPKKKRKVDKKYSIGLDIGTNSVGWAVITDEYKVPSKKFKVLGNTDRHSIKKNLIGALLFDSGETAEATRLKRTARRRYTRRKNRICYLQEIFSNEMAKVDDSFFHRLEESFLVEEDKKHERHPIFGNIVDEVAYHEKYPTIYHLRKKLVDSTDKADLRLIYLALAHMIKFRGHFLIEGDLNPDNSDVDKLFIQLVQTYNQLFEENPINASGVDAKAILSARLSKSRRLENLIAQLPGEKKNGLFGNLIALSLGLTPNFKSNFDLAEDAKLQLSKDTYDDDLDNLLAQIGDQYADLFLAAKNLSDAILLSDILRVNTEITKAPLSASMIKRYDEHHQDLTLLKALVRQQLPEKYKEIFFDQSKNGYAGYIDGGASQEEFYKFIKPILEKMDGTEELLVKLNREDLLRKQRTFDNGSIPHQIHLGELHAILRRQEDFYPFLKDNREKIEKILTFRIPYYVGPLARGNSRFAWMTRKSEETITPWNFEEVVDKGASAQSFIERMTNFDKNLPNEKVLPKHSLLYEYFTVYNELTKVKYVTEGMRKPAFLSGEQKKAIVDLLFKTNRKVTVKQLKEDYFKKIECFDSVEISGVEDRFNASLGTYHDLLKIIKDKDFLDNEENEDILEDIVLTLTLFEDREMIEERLKTYAHLFDDKVMKQLKRRRYTGWGRLSRKLINGIRDKQSGKTILDFLKSDGFANRNFMQLIHDDSLTFKEDIQKAQVSGQGDSLHEHIANLAGSPAIKKGILQTVKVVDELVKVMGRHKPENIVIEMARENQTTQKGQKNSRERMKRIEEGIKELGSQILKEHPVENTQLQNEKLYLYYLQNGRDMYVDQELDINRLSDYDVDAIVPQSFLKDDSIDNKVLTRSDKNRGKSDNVPSEEVVKKMKNYWRQLLNAKLITQRKFDNLTKAERGGLSELDKAGFIKRQLVETRQITKHVAQILDSRMNTKYDENDKLIREVKVITLKSKLVSDFRKDFQFYKVREINNYHHAHDAYLNAVVGTALIKKYPKLESEFVYGDYKVYDVRKMIAKSEQEIGKATAKYFFYSNIMNFFKTEITLANGEIRKRPLIETNGETGEIVWDKGRDFATVRKVLSMPQVNIVKKTEVQTGGFSKESILPKRNSDKLIARKKDWDPKKYGGFDSPTVAYSVLVVAKVEKGKSKKLKSVKELLGITIMERSSFEKNPIDFLEAKGYKEVKKDLIIKLPKYSLFELENGRKRMLASAGELQKGNELALPSKYVNFLYLASHYEKLKGSPEDNEQKQLFVEQHKHYLDEIIEQISEFSKRVILADANLDKVLSAYNKHRDKPIREQAENIIHLFTLTNLGAPAAFKYFDTTIDRKRYTSTKEVLDATLIHQSITGLYETRIDLSQLGGDSGGSSGGSSGSETPGTSESATPESSGGSSGGSSKWESRFELKPGKWVFVPTDETIEQGREIKELIEKRWKAPSYYYHLRQGGHVAALKQHLGHTCFIHVDIEDFFGSINRSRITRALKGYFSAEEAPEIATESTVRHPEDAERYILPFGFVQSPILASLCLRKSALGRYLHQLSKQDGVVVSVYVDDIIISGNDPERLEQVLEDIKAAAERSGFPLNEEKQQGPAETITAFNIELSQNSLEITPERMAEFRDARQQSTNEHQREGILGYVRSVNPAQASGGSKRTADGSEFEPKKKRKV

SEQ ID NO: 1580 - protein, 1685 aa, synthetic construct
MKRTADGSEFESPKKKRKVDKKYSIGLDIGTNSVGWAVITDEYKVPSKKFKVLGNTDRHSIKKNLIGALLFDSGETAEATRLKRTARRRYTRRKNRICYLQEIFSNEMAKVDDSFFHRLEESFLVEEDKKHERHPIFGNIVDEVAYHEKYPTIYHLRKKLVDSTDKADLRLIYLALAHMIKFRGHFLIEGDLNPDNSDVDKLFIQLVQTYNQLFEENPINASGVDAKAILSARLSKSRRLENLIAQLPGEKKNGLFGNLIALSLGLTPNFKSNFDLAEDAKLQLSKDTYDDDLDNLLAQIGDQYADLFLAAKNLSDAILLSDILRVNTEITKAPLSASMIKRYDEHHQDLTLLKALVRQQLPEKYKEIFFDQSKNGYAGYIDGGASQEEFYKFIKPILEKMDGTEELLVKLNREDLLRKQRTFDNGSIPHQIHLGELHAILRRQEDFYPFLKDNREKIEKILTFRIPYYVGPLARGNSRFAWMTRKSEETITPWNFEEVVDKGASAQSFIERMTNFDKNLPNEKVLPKHSLLYEYFTVYNELTKVKYVTEGMRKPAFLSGEQKKAIVDLLFKTNRKVTVKQLKEDYFKKIECFDSVEISGVEDRFNASLGTYHDLLKIIKDKDFLDNEENEDILEDIVLTLTLFEDREMIEERLKTYAHLFDDKVMKQLKRRRYTGWGRLSRKLINGIRDKQSGKTILDFLKSDGFANRNFMQLIHDDSLTFKEDIQKAQVSGQGDSLHEHIANLAGSPAIKKGILQTVKVVDELVKVMGRHKPENIVIEMARENQTTQKGQKNSRERMKRIEEGIKELGSQILKEHPVENTQLQNEKLYLYYLQNGRDMYVDQELDINRLSDYDVDAIVPQSFLKDDSIDNKVLTRSDKNRGKSDNVPSEEVVKKMKNYWRQLLNAKLITQRKFDNLTKAERGGLSELDKAGFIKRQLVETRQITKHVAQILDSRMNTKYDENDKLIREVKVITLKSKLVSDFRKDFQFYKVREINNYHHAHDAYLNAVVGTALIKKYPKLESEFVYGDYKVYDVRKMIAKSEQEIGKATAKYFFYSNIMNFFKTEITLANGEIRKRPLIETNGETGEIVWDKGRDFATVRKVLSMPQVNIVKKTEVQTGGFSKESILPKRNSDKLIARKKDWDPKKYGGFDSPTVAYSVLVVAKVEKGKSKKLKSVKELLGITIMERSSFEKNPIDFLEAKGYKEVKKDLIIKLPKYSLFELENGRKRMLASAGELQKGNELALPSKYVNFLYLASHYEKLKGSPEDNEQKQLFVEQHKHYLDEIIEQISEFSKRVILADANLDKVLSAYNKHRDKPIREQAENIIHLFTLTNLGAPAAFKYFDTTIDRKRYTSTKEVLDATLIHQSITGLYETRIDLSQLGGDSGGSSGGSSGSETPGTSESATPESSGGSSGGSSKWESRFELKPGKWVFVPTDETIEQGREIKELIEKRWKAPSYYYHLRQGGHVAALKQHLGHTCFIHVDIEDFFGSINRSSITRALKGYFSAEEAPEIATESTVRHPEDAERYILPFGFVQSPILASLCLRKSALGRYLHQLSKQDGVVVSVYVDDIIISGNDPERLEQVLEDIKAAAERSGFPLNEEKQQGPAETITAFNIELSQNSLEITPERMAEFRDAMQQSTNEHQREGILGYVRSVNPAQASGGSKRTADGSEFEPKKKRKV

SEQ ID NO: 1581 - protein, 1685 aa, synthetic construct
MKRTADGSEFESPKKKRKVDKKYSIGLDIGTNSVGWAVITDEYKVPSKKFKVLGNTDRHSIKKNLIGALLFDSGETAEATRLKRTARRRYTRRKNRICYLQEIFSNEMAKVDDSFFHRLEESFLVEEDKKHERHPIFGNIVDEVAYHEKYPTIYHLRKKLVDSTDKADLRLIYLALAHMIKFRGHFLIEGDLNPDNSDVDKLFIQLVQTYNQLFEENPINASGVDAKAILSARLSKSRRLENLIAQLPGEKKNGLFGNLIALSLGLTPNFKSNFDLAEDAKLQLSKDTYDDDLDNLLAQIGDQYADLFLAAKNLSDAILLSDILRVNTEITKAPLSASMIKRYDEHHQDLTLLKALVRQQLPEKYKEIFFDQSKNGYAGYIDGGASQEEFYKFIKPILEKMDGTEELLVKLNREDLLRKQRTFDNGSIPHQIHLGELHAILRRQEDFYPFLKDNREKIEKILTFRIPYYVGPLARGNSRFAWMTRKSEETITPWNFEEVVDKGASAQSFIERMTNFDKNLPNEKVLPKHSLLYEYFTVYNELTKVKYVTEGMRKPAFLSGEQKKAIVDLLFKTNRKVTVKQLKEDYFKKIECFDSVEISGVEDRFNASLGTYHDLLKIIKDKDFLDNEENEDILEDIVLTLTLFEDREMIEERLKTYAHLFDDKVMKQLKRRRYTGWGRLSRKLINGIRDKQSGKTILDFLKSDGFANRNFMQLIHDDSLTFKEDIQKAQVSGQGDSLHEHIANLAGSPAIKKGILQTVKVVDELVKVMGRHKPENIVIEMARENQTTQKGQKNSRERMKRIEEGIKELGSQILKEHPVENTQLQNEKLYLYYLQNGRDMYVDQELDINRLSDYDVDAIVPQSFLKDDSIDNKVLTRSDKNRGKSDNVPSEEVVKKMKNYWRQLLNAKLITQRKFDNLTKAERGGLSELDKAGFIKRQLVETRQITKHVAQILDSRMNTKYDENDKLIREVKVITLKSKLVSDFRKDFQFYKVREINNYHHAHDAYLNAVVGTALIKKYPKLESEFVYGDYKVYDVRKMIAKSEQEIGKATAKYFFYSNIMNFFKTEITLANGEIRKRPLIETNGETGEIVWDKGRDFATVRKVLSMPQVNIVKKTEVQTGGFSKESILPKRNSDKLIARKKDWDPKKYGGFDSPTVAYSVLVVAKVEKGKSKKLKSVKELLGITIMERSSFEKNPIDFLEAKGYKEVKKDLIIKLPKYSLFELENGRKRMLASAGELQKGNELALPSKYVNFLYLASHYEKLKGSPEDNEQKQLFVEQHKHYLDEIIEQISEFSKRVILADANLDKVLSAYNKHRDKPIREQAENIIHLFTLTNLGAPAAFKYFDTTIDRKRYTSTKEVLDATLIHQSITGLYETRIDLSQLGGDSGGSSGGSSGSETPGTSESATPESSGGSSGGSSKWESRFELKPGKWVFVPTDETIEQGREIKELIEKRWKAPSYYYHLRQGGHVAALKQHLGHTCFIHVDIEDFFGSINRSYITRALKGYFSYEEAPEIATESTVRHPEDAERYILPFGFVQSPILASLCLRKSALGRYLHQLSKQDGVVVSVYVDDIIISGNDPERLEQVLEDIKAAAERSGFPLNEEKQQGPAETITAFNIELSQNSLEITPERMAEFRDAMQQSTNEHQREGILGYVRSVNPAQASGGSKRTADGSEFEPKKKRKV

SEQ ID NO: 1582 - protein, 1685 aa, synthetic construct
MKRTADGSEFESPKKKRKVDKKYSIGLDIGTNSVGWAVITDEYKVPSKKFKVLGNTDRHSIKKNLIGALLFDSGETAEATRLKRTARRRYTRRKNRICYLQEIFSNEMAKVDDSFFHRLEESFLVEEDKKHERHPIFGNIVDEVAYHEKYPTIYHLRKKLVDSTDKADLRLIYLALAHMIKFRGHFLIEGDLNPDNSDVDKLFIQLVQTYNQLFEENPINASGVDAKAILSARLSKSRRLENLIAQLPGEKKNGLFGNLIALSLGLTPNFKSNFDLAEDAKLQLSKDTYDDDLDNLLAQIGDQYADLFLAAKNLSDAILLSDILRVNTEITKAPLSASMIKRYDEHHQDLTLLKALVRQQLPEKYKEIFFDQSKNGYAGYIDGGASQEEFYKFIKPILEKMDGTEELLVKLNREDLLRKQRTFDNGSIPHQIHLGELHAILRRQEDFYPFLKDNREKIEKILTFRIPYYVGPLARGNSRFAWMTRKSEETITPWNFEEVVDKGASAQSFIERMTNFDKNLPNEKVLPKHSLLYEYFTVYNELTKVKYVTEGMRKPAFLSGEQKKAIVDLLFKTNRKVTVKQLKEDYFKKIECFDSVEISGVEDRFNASLGTYHDLLKIIKDKDFLDNEENEDILEDIVLTLTLFEDREMIEERLKTYAHLFDDKVMKQLKRRRYTGWGRLSRKLINGIRDKQSGKTILDFLKSDGFANRNFMQLIHDDSLTFKEDIQKAQVSGQGDSLHEHIANLAGSPAIKKGILQTVKVVDELVKVMGRHKPENIVIEMARENQTTQKGQKNSRERMKRIEEGIKELGSQILKEHPVENTQLQNEKLYLYYLQNGRDMYVDQELDINRLSDYDVDAIVPQSFLKDDSIDNKVLTRSDKNRGKSDNVPSEEVVKKMKNYWRQLLNAKLITQRKFDNLTKAERGGLSELDKAGFIKRQLVETRQITKHVAQILDSRMNTKYDENDKLIREVKVITLKSKLVSDFRKDFQFYKVREINNYHHAHDAYLNAVVGTALIKKYPKLESEFVYGDYKVYDVRKMIAKSEQEIGKATAKYFFYSNIMNFFKTEITLANGEIRKRPLIETNGETGEIVWDKGRDFATVRKVLSMPQVNIVKKTEVQTGGFSKESILPKRNSDKLIARKKDWDPKKYGGFDSPTVAYSVLVVAKVEKGKSKKLKSVKELLGITIMERSSFEKNPIDFLEAKGYKEVKKDLIIKLPKYSLFELENGRKRMLASAGELQKGNELALPSKYVNFLYLASHYEKLKGSPEDNEQKQLFVEQHKHYLDEIIEQISEFSKRVILADANLDKVLSAYNKHRDKPIREQAENIIHLFTLTNLGAPAAFKYFDTTIDRKRYTSTKEVLDATLIHQSITGLYETRIDLSQLGGDSGGSSGGSSGSETPGTSESATPESSGGSSGGSSKWESRFELKPGKWVFVPTDETIEQGREIKELIEKRWKAPSYYYHLRQGGHVAALKQHLGHTCFIHVDIEDFFGSINRSRITRALKGYFSYEEAREIATESTVRHPEDAERYILPFGFVQSPILASLCLRKSALGRYLHQLSKQDGVVVSVYVDDIIISGNDPERLEQVLEDIKAAAERSGFPLNEEKQQGPAETITAFNIELSQNSLEITPERMAEFRDARQQSTNEHQREGILGYVRSVNPAQASGGSKRTADGSEFEPKKKRKV

SEQ ID NO: 1583 - protein, 1685 aa, synthetic construct
MKRTADGSEFESPKKKRKVDKKYSIGLDIGTNSVGWAVITDEYKVPSKKFKVLGNTDRHSIKKNLIGALLFDSGETAEATRLKRTARRRYTRRKNRICYLQEIFSNEMAKVDDSFFHRLEESFLVEEDKKHERHPIFGNIVDEVAYHEKYPTIYHLRKKLVDSTDKADLRLIYLALAHMIKFRGHFLIEGDLNPDNSDVDKLFIQLVQTYNQLFEENPINASGVDAKAILSARLSKSRRLENLIAQLPGEKKNGLFGNLIALSLGLTPNFKSNFDLAEDAKLQLSKDTYDDDLDNLLAQIGDQYADLFLAAKNLSDAILLSDILRVNTEITKAPLSASMIKRYDEHHQDLTLLKALVRQQLPEKYKEIFFDQSKNGYAGYIDGGASQEEFYKFIKPILEKMDGTEELLVKLNREDLLRKQRTFDNGSIPHQIHLGELHAILRRQEDFYPFLKDNREKIEKILTFRIPYYVGPLARGNSRFAWMTRKSEETITPWNFEEVVDKGASAQSFIERMTNFDKNLPNEKVLPKHSLLYEYFTVYNELTKVKYVTEGMRKPAFLSGEQKKAIVDLLFKTNRKVTVKQLKEDYFKKIECFDSVEISGVEDRFNASLGTYHDLLKIIKDKDFLDNEENEDILEDIVLTLTLFEDREMIEERLKTYAHLFDDKVMKQLKRRRYTGWGRLSRKLINGIRDKQSGKTILDFLKSDGFANRNFMQLIHDDSLTFKEDIQKAQVSGQGDSLHEHIANLAGSPAIKKGILQTVKVVDELVKVMGRHKPENIVIEMARENQTTQKGQKNSRERMKRIEEGIKELGSQILKEHPVENTQLQNEKLYLYYLQNGRDMYVDQELDINRLSDYDVDAIVPQSFLKDDSIDNKVLTRSDKNRGKSDNVPSEEVVKKMKNYWRQLLNAKLITQRKFDNLTKAERGGLSELDKAGFIKRQLVETRQITKHVAQILDSRMNTKYDENDKLIREVKVITLKSKLVSDFRKDFQFYKVREINNYHHAHDAYLNAVVGTALIKKYPKLESEFVYGDYKVYDVRKMIAKSEQEIGKATAKYFFYSNIMNFFKTEITLANGEIRKRPLIETNGETGEIVWDKGRDFATVRKVLSMPQVNIVKKTEVQTGGFSKESILPKRNSDKLIARKKDWDPKKYGGFDSPTVAYSVLVVAKVEKGKSKKLKSVKELLGITIMERSSFEKNPIDFLEAKGYKEVKKDLIIKLPKYSLFELENGRKRMLASAGELQKGNELALPSKYVNFLYLASHYEKLKGSPEDNEQKQLFVEQHKHYLDEIIEQISEFSKRVILADANLDKVLSAYNKHRDKPIREQAENIIHLFTLTNLGAPAAFKYFDTTIDRKRYTSTKEVLDATLIHQSITGLYETRIDLSQLGGDSGGSSGGSSGSETPGTSESATPESSGGSSGGSSKWESRFELKPGKWVFVPTDETIEQGREIKELIEKPWKAPSYYYHLRQGGHVAALKQHLGHTCFIHVDIEDFFGSINRSRITRALKGYFSYEEAPEIATESTVRHPEDAERYILPFGFVQSPILASLCLRKSALGRYLHQLSKQDGVVVSVYVDDIIISGNDPERLEQVLEDIKAAAERSGFPLNEEKQQGPAETITAFNIELSQNSLEITPERMAEFRDAMQQSTNEHQREGILGYVRSVNPAQASGGSKRTADGSEFEPKKKRKV

SEQ ID NO: 1584 - protein, 1685 aa, synthetic construct
MKRTADGSEFESPKKKRKVDKKYSIGLDIGTNSVGWAVITDEYKVPSKKFKVLGNTDRHSIKKNLIGALLFDSGETAEATRLKRTARRRYTRRKNRICYLQEIFSNEMAKVDDSFFHRLEESFLVEEDKKHERHPIFGNIVDEVAYHEKYPTIYHLRKKLVDSTDKADLRLIYLALAHMIKFRGHFLIEGDLNPDNSDVDKLFIQLVQTYNQLFEENPINASGVDAKAILSARLSKSRRLENLIAQLPGEKKNGLFGNLIALSLGLTPNFKSNFDLAEDAKLQLSKDTYDDDLDNLLAQIGDQYADLFLAAKNLSDAILLSDILRVNTEITKAPLSASMIKRYDEHHQDLTLLKALVRQQLPEKYKEIFFDQSKNGYAGYIDGGASQEEFYKFIKPILEKMDGTEELLVKLNREDLLRKQRTFDNGSIPHQIHLGELHAILRRQEDFYPFLKDNREKIEKILTFRIPYYVGPLARGNSRFAWMTRKSEETITPWNFEEVVDKGASAQSFIERMTNFDKNLPNEKVLPKHSLLYEYFTVYNELTKVKYVTEGMRKPAFLSGEQKKAIVDLLFKTNRKVTVKQLKEDYFKKIECFDSVEISGVEDRFNASLGTYHDLLKIIKDKDFLDNEENEDILEDIVLTLTLFEDREMIEERLKTYAHLFDDKVMKQLKRRRYTGWGRLSRKLINGIRDKQSGKTILDFLKSDGFANRNFMQLIHDDSLTFKEDIQKAQVSGQGDSLHEHIANLAGSPAIKKGILQTVKVVDELVKVMGRHKPENIVIEMARENQTTQKGQKNSRERMKRIEEGIKELGSQILKEHPVENTQLQNEKLYLYYLQNGRDMYVDQELDINRLSDYDVDAIVPQSFLKDDSIDNKVLTRSDKNRGKSDNVPSEEVVKKMKNYWRQLLNAKLITQRKFDNLTKAERGGLSELDKAGFIKRQLVETRQITKHVAQILDSRMNTKYDENDKLIREVKVITLKSKLVSDFRKDFQFYKVREINNYHHAHDAYLNAVVGTALIKKYPKLESEFVYGDYKVYDVRKMIAKSEQEIGKATAKYFFYSNIMNFFKTEITLANGEIRKRPLIETNGETGEIVWDKGRDFATVRKVLSMPQVNIVKKTEVQTGGFSKESILPKRNSDKLIARKKDWDPKKYGGFDSPTVAYSVLVVAKVEKGKSKKLKSVKELLGITIMERSSFEKNPIDFLEAKGYKEVKKDLIIKLPKYSLFELENGRKRMLASAGELQKGNELALPSKYVNFLYLASHYEKLKGSPEDNEQKQLFVEQHKHYLDEIIEQISEFSKRVILADANLDKVLSAYNKHRDKPIREQAENIIHLFTLTNLGAPAAFKYFDTTIDRKRYTSTKEVLDATLIHQSITGLYETRIDLSQLGGDSGGSSGGSSGSETPGTSESATPESSGGSSGGSSKWESRFELKPGKWVFVPTDETIEQGREIKELIEKPWKAPSYYYHLRQGGHVAALKQHLGHTCFIHVDIEDFFGSINRSDITRALKGYFSYEEAREIATESTVRHPEDAERYILPFGFVQSPILASLCLRKSALGRYLHQLSKQDGVVVSVYVDDIIISGNDPERLEQVLEDIKAAAERSGFPLNEEKQQGPAETITAFNIELSQNSLEITPERMAEFRDAMQQSTNEHQREGILGYVRSVNPAQASGGSKRTADGSEFEPKKKRKV

SEQ ID NO: 1585 - protein, 1685 aa, synthetic construct
MKRTADGSEFESPKKKRKVDKKYSIGLDIGTNSVGWAVITDEYKVPSKKFKVLGNTDRHSIKKNLIGALLFDSGETAEATRLKRTARRRYTRRKNRICYLQEIFSNEMAKVDDSFFHRLEESFLVEEDKKHERHPIFGNIVDEVAYHEKYPTIYHLRKKLVDSTDKADLRLIYLALAHMIKFRGHFLIEGDLNPDNSDVDKLFIQLVQTYNQLFEENPINASGVDAKAILSARLSKSRRLENLIAQLPGEKKNGLFGNLIALSLGLTPNFKSNFDLAEDAKLQLSKDTYDDDLDNLLAQIGDQYADLFLAAKNLSDAILLSDILRVNTEITKAPLSASMIKRYDEHHQDLTLLKALVRQQLPEKYKEIFFDQSKNGYAGYIDGGASQEEFYKFIKPILEKMDGTEELLVKLNREDLLRKQRTFDNGSIPHQIHLGELHAILRRQEDFYPFLKDNREKIEKILTFRIPYYVGPLARGNSRFAWMTRKSEETITPWNFEEVVDKGASAQSFIERMTNFDKNLPNEKVLPKHSLLYEYFTVYNELTKVKYVTEGMRKPAFLSGEQKKAIVDLLFKTNRKVTVKQLKEDYFKKIECFDSVEISGVEDRFNASLGTYHDLLKIIKDKDFLDNEENEDILEDIVLTLTLFEDREMIEERLKTYAHLFDDKVMKQLKRRRYTGWGRLSRKLINGIRDKQSGKTILDFLKSDGFANRNFMQLIHDDSLTFKEDIQKAQVSGQGDSLHEHIANLAGSPAIKKGILQTVKVVDELVKVMGRHKPENIVIEMARENQTTQKGQKNSRERMKRIEEGIKELGSQILKEHPVENTQLQNEKLYLYYLQNGRDMYVDQELDINRLSDYDVDAIVPQSFLKDDSIDNKVLTRSDKNRGKSDNVPSEEVVKKMKNYWRQLLNAKLITQRKFDNLTKAERGGLSELDKAGFIKRQLVETRQITKHVAQILDSRMNTKYDENDKLIREVKVITLKSKLVSDFRKDFQFYKVREINNYHHAHDAYLNAVVGTALIKKYPKLESEFVYGDYKVYDVRKMIAKSEQEIGKATAKYFFYSNIMNFFKTEITLANGEIRKRPLIETNGETGEIVWDKGRDFATVRKVLSMPQVNIVKKTEVQTGGFSKESILPKRNSDKLIARKKDWDPKKYGGFDSPTVAYSVLVVAKVEKGKSKKLKSVKELLGITIMERSSFEKNPIDFLEAKGYKEVKKDLIIKLPKYSLFELENGRKRMLASAGELQKGNELALPSKYVNFLYLASHYEKLKGSPEDNEQKQLFVEQHKHYLDEIIEQISEFSKRVILADANLDKVLSAYNKHRDKPIREQAENIIHLFTLTNLGAPAAFKYFDTTIDRKRYTSTKEVLDATLIHQSITGLYETRIDLSQLGGDSGGSSGGSSGSETPGTSESATPESSGGSSGGSSKWESRFELKPGKWVFVPTDETIEQGREIKELIEKRWKAPSYYYHLRQGGHVAALKQHLGHTCFIHVDIEDFFGSINRSDITRALKGYFSYEEAREIATESTVRHPEDAERYILPFGFVQSPILASLCLRKSALGRYLHQLSKQDGVVVSVYVDDIIISGNDPERLEQVLEDIKAAAERSGFPLNEEKQQGPAETITAFNIELSQNSLEITPERTAEFRDARQQSTNEHQREGILGYVRSVNPAQASGGSKRTADGSEFEPKKKRKV

SEQ ID NO: 1586 - protein, 1685 aa, synthetic construct
MKRTADGSEFESPKKKRKVDKKYSIGLDIGTNSVGWAVITDEYKVPSKKFKVLGNTDRHSIKKNLIGALLFDSGETAEATRLKRTARRRYTRRKNRICYLQEIFSNEMAKVDDSFFHRLEESFLVEEDKKHERHPIFGNIVDEVAYHEKYPTIYHLRKKLVDSTDKADLRLIYLALAHMIKFRGHFLIEGDLNPDNSDVDKLFIQLVQTYNQLFEENPINASGVDAKAILSARLSKSRRLENLIAQLPGEKKNGLFGNLIALSLGLTPNFKSNFDLAEDAKLQLSKDTYDDDLDNLLAQIGDQYADLFLAAKNLSDAILLSDILRVNTEITKAPLSASMIKRYDEHHQDLTLLKALVRQQLPEKYKEIFFDQSKNGYAGYIDGGASQEEFYKFIKPILEKMDGTEELLVKLNREDLLRKQRTFDNGSIPHQIHLGELHAILRRQEDFYPFLKDNREKIEKILTFRIPYYVGPLARGNSRFAWMTRKSEETITPWNFEEVVDKGASAQSFIERMTNFDKNLPNEKVLPKHSLLYEYFTVYNELTKVKYVTEGMRKPAFLSGEQKKAIVDLLFKTNRKVTVKQLKEDYFKKIECFDSVEISGVEDRFNASLGTYHDLLKIIKDKDFLDNEENEDILEDIVLTLTLFEDREMIEERLKTYAHLFDDKVMKQLKRRRYTGWGRLSRKLINGIRDKQSGKTILDFLKSDGFANRNFMQLIHDDSLTFKEDIQKAQVSGQGDSLHEHIANLAGSPAIKKGILQTVKVVDELVKVMGRHKPENIVIEMARENQTTQKGQKNSRERMKRIEEGIKELGSQILKEHPVENTQLQNEKLYLYYLQNGRDMYVDQELDINRLSDYDVDAIVPQSFLKDDSIDNKVLTRSDKNRGKSDNVPSEEVVKKMKNYWRQLLNAKLITQRKFDNLTKAERGGLSELDKAGFIKRQLVETRQITKHVAQILDSRMNTKYDENDKLIREVKVITLKSKLVSDFRKDFQFYKVREINNYHHAHDAYLNAVVGTALIKKYPKLESEFVYGDYKVYDVRKMIAKSEQEIGKATAKYFFYSNIMNFFKTEITLANGEIRKRPLIETNGETGEIVWDKGRDFATVRKVLSMPQVNIVKKTEVQTGGFSKESILPKRNSDKLIARKKDWDPKKYGGFDSPTVAYSVLVVAKVEKGKSKKLKSVKELLGITIMERSSFEKNPIDFLEAKGYKEVKKDLIIKLPKYSLFELENGRKRMLASAGELQKGNELALPSKYVNFLYLASHYEKLKGSPEDNEQKQLFVEQHKHYLDEIIEQISEFSKRVILADANLDKVLSAYNKHRDKPIREQAENIIHLFTLTNLGAPAAFKYFDTTIDRKRYTSTKEVLDATLIHQSITGLYETRIDLSQLGGDSGGSSGGSSGSETPGTSESATPESSGGSSGGSSKWESRFELKPGKWVFVPTDETIEQGREIKELIEKRWKAPSYYYHLRQGGHVAALKQHLGHTCFIHVDIEDFFGSINRSIITRALKGYFSYEEAREIATESTVRHPEDAERYILPFGFVQSPILASLCLRKSALGRYLHQLSKQDGVVVSVYVDDIIISGNDPERLEQVLEDIKAAAERSGFPLNEEKQQGPAETITAFNIELSQNSLEITPERMAEFRDAMQQSTNEHQREGILGYVRSVNPAQASGGSKRTADGSEFEPKKKRKV

SEQ ID NO: 1587 - protein, 1685 aa, synthetic construct
MKRTADGSEFESPKKKRKVDKKYSIGLDIGTNSVGWAVITDEYKVPSKKFKVLGNTDRHSIKKNLIGALLFDSGETAEATRLKRTARRRYTRRKNRICYLQEIFSNEMAKVDDSFFHRLEESFLVEEDKKHERHPIFGNIVDEVAYHEKYPTIYHLRKKLVDSTDKADLRLIYLALAHMIKFRGHFLIEGDLNPDNSDVDKLFIQLVQTYNQLFEENPINASGVDAKAILSARLSKSRRLENLIAQLPGEKKNGLFGNLIALSLGLTPNFKSNFDLAEDAKLQLSKDTYDDDLDNLLAQIGDQYADLFLAAKNLSDAILLSDILRVNTEITKAPLSASMIKRYDEHHQDLTLLKALVRQQLPEKYKEIFFDQSKNGYAGYIDGGASQEEFYKFIKPILEKMDGTEELLVKLNREDLLRKQRTFDNGSIPHQIHLGELHAILRRQEDFYPFLKDNREKIEKILTFRIPYYVGPLARGNSRFAWMTRKSEETITPWNFEEVVDKGASAQSFIERMTNFDKNLPNEKVLPKHSLLYEYFTVYNELTKVKYVTEGMRKPAFLSGEQKKAIVDLLFKTNRKVTVKQLKEDYFKKIECFDSVEISGVEDRFNASLGTYHDLLKIIKDKDFLDNEENEDILEDIVLTLTLFEDREMIEERLKTYAHLFDDKVMKQLKRRRYTGWGRLSRKLINGIRDKQSGKTILDFLKSDGFANRNFMQLIHDDSLTFKEDIQKAQVSGQGDSLHEHIANLAGSPAIKKGILQTVKVVDELVKVMGRHKPENIVIEMARENQTTQKGQKNSRERMKRIEEGIKELGSQILKEHPVENTQLQNEKLYLYYLQNGRDMYVDQELDINRLSDYDVDAIVPQSFLKDDSIDNKVLTRSDKNRGKSDNVPSEEVVKKMKNYWRQLLNAKLITQRKFDNLTKAERGGLSELDKAGFIKRQLVETRQITKHVAQILDSRMNTKYDENDKLIREVKVITLKSKLVSDFRKDFQFYKVREINNYHHAHDAYLNAVVGTALIKKYPKLESEFVYGDYKVYDVRKMIAKSEQEIGKATAKYFFYSNIMNFFKTEITLANGEIRKRPLIETNGETGEIVWDKGRDFATVRKVLSMPQVNIVKKTEVQTGGFSKESILPKRNSDKLIARKKDWDPKKYGGFDSPTVAYSVLVVAKVEKGKSKKLKSVKELLGITIMERSSFEKNPIDFLEAKGYKEVKKDLIIKLPKYSLFELENGRKRMLASAGELQKGNELALPSKYVNFLYLASHYEKLKGSPEDNEQKQLFVEQHKHYLDEIIEQISEFSKRVILADANLDKVLSAYNKHRDKPIREQAENIIHLFTLTNLGAPAAFKYFDTTIDRKRYTSTKEVLDATLIHQSITGLYETRIDLSQLGGDSGGSSGGSSGSETPGTSESATPESSGGSSGGSSKWESRFELKPGKWVFVPTDETIEQGREIKELIEKRWKAPSYYYHLRQGGHVAALKQHLGHTCFIHVDIEDFFGSINRSRITRALKGYFSYEEAAEIATESTVRHPEDAERYILPFGFVQSPILASLCLRKSALGRYLHQLSKQDGVVVSVYVDDIIISGNDPERLEQVLEDIKAAAERSGFPLNEEKQQGPAETITAFNIELSQNSLEITPERMAEFRDAMQQSTNEHQREGILGYVRSVNPAQASGGSKRTADGSEFEPKKKRKV

SEQ ID NO: 1588 - protein, 1685 aa, synthetic construct
MKRTADGSEFESPKKKRKVDKKYSIGLDIGTNSVGWAVITDEYKVPSKKFKVLGNTDRHSIKKNLIGALLFDSGETAEATRLKRTARRRYTRRKNRICYLQEIFSNEMAKVDDSFFHRLEESFLVEEDKKHERHPIFGNIVDEVAYHEKYPTIYHLRKKLVDSTDKADLRLIYLALAHMIKFRGHFLIEGDLNPDNSDVDKLFIQLVQTYNQLFEENPINASGVDAKAILSARLSKSRRLENLIAQLPGEKKNGLFGNLIALSLGLTPNFKSNFDLAEDAKLQLSKDTYDDDLDNLLAQIGDQYADLFLAAKNLSDAILLSDILRVNTEITKAPLSASMIKRYDEHHQDLTLLKALVRQQLPEKYKEIFFDQSKNGYAGYIDGGASQEEFYKFIKPILEKMDGTEELLVKLNREDLLRKQRTFDNGSIPHQIHLGELHAILRRQEDFYPFLKDNREKIEKILTFRIPYYVGPLARGNSRFAWMTRKSEETITPWNFEEVVDKGASAQSFIERMTNFDKNLPNEKVLPKHSLLYEYFTVYNELTKVKYVTEGMRKPAFLSGEQKKAIVDLLFKTNRKVTVKQLKEDYFKKIECFDSVEISGVEDRFNASLGTYHDLLKIIKDKDFLDNEENEDILEDIVLTLTLFEDREMIEERLKTYAHLFDDKVMKQLKRRRYTGWGRLSRKLINGIRDKQSGKTILDFLKSDGFANRNFMQLIHDDSLTFKEDIQKAQVSGQGDSLHEHIANLAGSPAIKKGILQTVKVVDELVKVMGRHKPENIVIEMARENQTTQKGQKNSRERMKRIEEGIKELGSQILKEHPVENTQLQNEKLYLYYLQNGRDMYVDQELDINRLSDYDVDAIVPQSFLKDDSIDNKVLTRSDKNRGKSDNVPSEEVVKKMKNYWRQLLNAKLITQRKFDNLTKAERGGLSELDKAGFIKRQLVETRQITKHVAQILDSRMNTKYDENDKLIREVKVITLKSKLVSDFRKDFQFYKVREINNYHHAHDAYLNAVVGTALIKKYPKLESEFVYGDYKVYDVRKMIAKSEQEIGKATAKYFFYSNIMNFFKTEITLANGEIRKRPLIETNGETGEIVWDKGRDFATVRKVLSMPQVNIVKKTEVQTGGFSKESILPKRNSDKLIARKKDWDPKKYGGFDSPTVAYSVLVVAKVEKGKSKKLKSVKELLGITIMERSSFEKNPIDFLEAKGYKEVKKDLIIKLPKYSLFELENGRKRMLASAGELQKGNELALPSKYVNFLYLASHYEKLKGSPEDNEQKQLFVEQHKHYLDEIIEQISEFSKRVILADANLDKVLSAYNKHRDKPIREQAENIIHLFTLTNLGAPAAFKYFDTTIDRKRYTSTKEVLDATLIHQSITGLYETRIDLSQLGGDSGGSSGGSSGSETPGTSESATPESSGGSSGGSSKWESRFELKPGKWVFVPTDETIEQGREIKELIEKRWKAPSYYYHLRQGGHVAALKQHLGHTCFIHVDIEDFFGSINRSRITRALKGYFSYEEAREIATESTVRHPEDAERYILPFGFVQSPILASLCLRKSALGRYLHQLSKQDGVVVSVYVDDIIISGNDPERLEQVLEDIKAAAERSGFPLNEEKQQGPAETITAFNIELSQNSLEITPERMAEFRDAMQQSTNEHQREGILGYQRSVNPAQASGGSKRTADGSEFEPKKKRKV

SEQ ID NO: 1589 - protein, 1685 aa, synthetic construct
MKRTADGSEFESPKKKRKVDKKYSIGLDIGTNSVGWAVITDEYKVPSKKFKVLGNTDRHSIKKNLIGALLFDSGETAEATRLKRTARRRYTRRKNRICYLQEIFSNEMAKVDDSFFHRLEESFLVEEDKKHERHPIFGNIVDEVAYHEKYPTIYHLRKKLVDSTDKADLRLIYLALAHMIKFRGHFLIEGDLNPDNSDVDKLFIQLVQTYNQLFEENPINASGVDAKAILSARLSKSRRLENLIAQLPGEKKNGLFGNLIALSLGLTPNFKSNFDLAEDAKLQLSKDTYDDDLDNLLAQIGDQYADLFLAAKNLSDAILLSDILRVNTEITKAPLSASMIKRYDEHHQDLTLLKALVRQQLPEKYKEIFFDQSKNGYAGYIDGGASQEEFYKFIKPILEKMDGTEELLVKLNREDLLRKQRTFDNGSIPHQIHLGELHAILRRQEDFYPFLKDNREKIEKILTFRIPYYVGPLARGNSRFAWMTRKSEETITPWNFEEVVDKGASAQSFIERMTNFDKNLPNEKVLPKHSLLYEYFTVYNELTKVKYVTEGMRKPAFLSGEQKKAIVDLLFKTNRKVTVKQLKEDYFKKIECFDSVEISGVEDRFNASLGTYHDLLKIIKDKDFLDNEENEDILEDIVLTLTLFEDREMIEERLKTYAHLFDDKVMKQLKRRRYTGWGRLSRKLINGIRDKQSGKTILDFLKSDGFANRNFMQLIHDDSLTFKEDIQKAQVSGQGDSLHEHIANLAGSPAIKKGILQTVKVVDELVKVMGRHKPENIVIEMARENQTTQKGQKNSRERMKRIEEGIKELGSQILKEHPVENTQLQNEKLYLYYLQNGRDMYVDQELDINRLSDYDVDAIVPQSFLKDDSIDNKVLTRSDKNRGKSDNVPSEEVVKKMKNYWRQLLNAKLITQRKFDNLTKAERGGLSELDKAGFIKRQLVETRQITKHVAQILDSRMNTKYDENDKLIREVKVITLKSKLVSDFRKDFQFYKVREINNYHHAHDAYLNAVVGTALIKKYPKLESEFVYGDYKVYDVRKMIAKSEQEIGKATAKYFFYSNIMNFFKTEITLANGEIRKRPLIETNGETGEIVWDKGRDFATVRKVLSMPQVNIVKKTEVQTGGFSKESILPKRNSDKLIARKKDWDPKKYGGFDSPTVAYSVLVVAKVEKGKSKKLKSVKELLGITIMERSSFEKNPIDFLEAKGYKEVKKDLIIKLPKYSLFELENGRKRMLASAGELQKGNELALPSKYVNFLYLASHYEKLKGSPEDNEQKQLFVEQHKHYLDEIIEQISEFSKRVILADANLDKVLSAYNKHRDKPIREQAENIIHLFTLTNLGAPAAFKYFDTTIDRKRYTSTKEVLDATLIHQSITGLYETRIDLSQLGGDSGGSSGGSSGSETPGTSESATPESSGGSSGGSSKWESRFELKPGKWVFVPTDETIEQGREIKELIEKRWKAPSYYYHLRQGGHVAALKQHLGHTCFIHVDIEDFFGSINRSWITRALKGYFSYEEAREIATESTVRHPEDAERYILPFGFVQSPILASLCLRKSALGRYLHQLSKQDGVVVSVYVDDIIISGNDPERLEQVLEDIKAAAERSGFPLNEEKQQGPAETITAFNIELSQNSLEITPERMAEFRDAMQQSTNEHQREGILGYVRSVNPAQASGGSKRTADGSEFEPKKKRKV

SEQ ID NO: 1590 - protein, 1685 aa, synthetic construct
MKRTADGSEFESPKKKRKVDKKYSIGLDIGTNSVGWAVITDEYKVPSKKFKVLGNTDRHSIKKNLIGALLFDSGETAEATRLKRTARRRYTRRKNRICYLQEIFSNEMAKVDDSFFHRLEESFLVEEDKKHERHPIFGNIVDEVAYHEKYPTIYHLRKKLVDSTDKADLRLIYLALAHMIKFRGHFLIEGDLNPDNSDVDKLFIQLVQTYNQLFEENPINASGVDAKAILSARLSKSRRLENLIAQLPGEKKNGLFGNLIALSLGLTPNFKSNFDLAEDAKLQLSKDTYDDDLDNLLAQIGDQYADLFLAAKNLSDAILLSDILRVNTEITKAPLSASMIKRYDEHHQDLTLLKALVRQQLPEKYKEIFFDQSKNGYAGYIDGGASQEEFYKFIKPILEKMDGTEELLVKLNREDLLRKQRTFDNGSIPHQIHLGELHAILRRQEDFYPFLKDNREKIEKILTFRIPYYVGPLARGNSRFAWMTRKSEETITPWNFEEVVDKGASAQSFIERMTNFDKNLPNEKVLPKHSLLYEYFTVYNELTKVKYVTEGMRKPAFLSGEQKKAIVDLLFKTNRKVTVKQLKEDYFKKIECFDSVEISGVEDRFNASLGTYHDLLKIIKDKDFLDNEENEDILEDIVLTLTLFEDREMIEERLKTYAHLFDDKVMKQLKRRRYTGWGRLSRKLINGIRDKQSGKTILDFLKSDGFANRNFMQLIHDDSLTFKEDIQKAQVSGQGDSLHEHIANLAGSPAIKKGILQTVKVVDELVKVMGRHKPENIVIEMARENQTTQKGQKNSRERMKRIEEGIKELGSQILKEHPVENTQLQNEKLYLYYLQNGRDMYVDQELDINRLSDYDVDAIVPQSFLKDDSIDNKVLTRSDKNRGKSDNVPSEEVVKKMKNYWRQLLNAKLITQRKFDNLTKAERGGLSELDKAGFIKRQLVETRQITKHVAQILDSRMNTKYDENDKLIREVKVITLKSKLVSDFRKDFQFYKVREINNYHHAHDAYLNAVVGTALIKKYPKLESEFVYGDYKVYDVRKMIAKSEQEIGKATAKYFFYSNIMNFFKTEITLANGEIRKRPLIETNGETGEIVWDKGRDFATVRKVLSMPQVNIVKKTEVQTGGFSKESILPKRNSDKLIARKKDWDPKKYGGFDSPTVAYSVLVVAKVEKGKSKKLKSVKELLGITIMERSSFEKNPIDFLEAKGYKEVKKDLIIKLPKYSLFELENGRKRMLASAGELQKGNELALPSKYVNFLYLASHYEKLKGSPEDNEQKQLFVEQHKHYLDEIIEQISEFSKRVILADANLDKVLSAYNKHRDKPIREQAENIIHLFTLTNLGAPAAFKYFDTTIDRKRYTSTKEVLDATLIHQSITGLYETRIDLSQLGGDSGGSSGGSSGSETPGTSESATPESSGGSSGGSSKWESRFELKPGKWVFVPTDETIEQGREIKELIEKRWKAPSYYYHLRQGGHVAALKQHLGHTCFIHVDIEDFFGSINRSLITRALKGYFSYEEAREIATESTVRHPEDAERYILPFGFVQSPILASLCLRKSALGRYLHQLSKQDGVVVSVYVDDIIISGNDPERLEQVLEDIKAAAERSGFPLNEEKQQGPAETITAFNIELSQNSLEITPERMAEFRDAMQQSTNEHQREGILGYVRSVNPAQASGGSKRTADGSEFEPKKKRKV

SEQ ID NO: 1591 - protein, 1685 aa, synthetic construct
MKRTADGSEFESPKKKRKVDKKYSIGLDIGTNSVGWAVITDEYKVPSKKFKVLGNTDRHSIKKNLIGALLFDSGETAEATRLKRTARRRYTRRKNRICYLQEIFSNEMAKVDDSFFHRLEESFLVEEDKKHERHPIFGNIVDEVAYHEKYPTIYHLRKKLVDSTDKADLRLIYLALAHMIKFRGHFLIEGDLNPDNSDVDKLFIQLVQTYNQLFEENPINASGVDAKAILSARLSKSRRLENLIAQLPGEKKNGLFGNLIALSLGLTPNFKSNFDLAEDAKLQLSKDTYDDDLDNLLAQIGDQYADLFLAAKNLSDAILLSDILRVNTEITKAPLSASMIKRYDEHHQDLTLLKALVRQQLPEKYKEIFFDQSKNGYAGYIDGGASQEEFYKFIKPILEKMDGTEELLVKLNREDLLRKQRTFDNGSIPHQIHLGELHAILRRQEDFYPFLKDNREKIEKILTFRIPYYVGPLARGNSRFAWMTRKSEETITPWNFEEVVDKGASAQSFIERMTNFDKNLPNEKVLPKHSLLYEYFTVYNELTKVKYVTEGMRKPAFLSGEQKKAIVDLLFKTNRKVTVKQLKEDYFKKIECFDSVEISGVEDRFNASLGTYHDLLKIIKDKDFLDNEENEDILEDIVLTLTLFEDREMIEERLKTYAHLFDDKVMKQLKRRRYTGWGRLSRKLINGIRDKQSGKTILDFLKSDGFANRNFMQLIHDDSLTFKEDIQKAQVSGQGDSLHEHIANLAGSPAIKKGILQTVKVVDELVKVMGRHKPENIVIEMARENQTTQKGQKNSRERMKRIEEGIKELGSQILKEHPVENTQLQNEKLYLYYLQNGRDMYVDQELDINRLSDYDVDAIVPQSFLKDDSIDNKVLTRSDKNRGKSDNVPSEEVVKKMKNYWRQLLNAKLITQRKFDNLTKAERGGLSELDKAGFIKRQLVETRQITKHVAQILDSRMNTKYDENDKLIREVKVITLKSKLVSDFRKDFQFYKVREINNYHHAHDAYLNAVVGTALIKKYPKLESEFVYGDYKVYDVRKMIAKSEQEIGKATAKYFFYSNIMNFFKTEITLANGEIRKRPLIETNGETGEIVWDKGRDFATVRKVLSMPQVNIVKKTEVQTGGFSKESILPKRNSDKLIARKKDWDPKKYGGFDSPTVAYSVLVVAKVEKGKSKKLKSVKELLGITIMERSSFEKNPIDFLEAKGYKEVKKDLIIKLPKYSLFELENGRKRMLASAGELQKGNELALPSKYVNFLYLASHYEKLKGSPEDNEQKQLFVEQHKHYLDEIIEQISEFSKRVILADANLDKVLSAYNKHRDKPIREQAENIIHLFTLTNLGAPAAFKYFDTTIDRKRYTSTKEVLDATLIHQSITGLYETRIDLSQLGGDSGGSSGGSSGSETPGTSESATPESSGGSSGGSSKWESRFELKPGKWVFVPTDETIEQGREIKELIEKRWKAPSYYYHLRQGGHVAALKQHLGHTCFIHVDIEDFFGSINRSRITRALKGYFSYEEAREIATESTVRHPEDAERYILPFGFVQSPILASLCLRKSALGRYLHQLSKQDGVVVSVYVDDIIISGNDPERLEQVLEDIKAAAEDSGFPLNEEKQQGPAETITAFNIELSQNSLEITPERMAEFRDAMQQSTNEHQREGILGYVRSVNPAQASGGSKRTADGSEFEPKKKRKV

SEQ ID NO: 1592 - protein, 1685 aa, synthetic construct
MKRTADGSEFESPKKKRKVDKKYSIGLDIGTNSVGWAVITDEYKVPSKKFKVLGNTDRHSIKKNLIGALLFDSGETAEATRLKRTARRRYTRRKNRICYLQEIFSNEMAKVDDSFFHRLEESFLVEEDKKHERHPIFGNIVDEVAYHEKYPTIYHLRKKLVDSTDKADLRLIYLALAHMIKFRGHFLIEGDLNPDNSDVDKLFIQLVQTYNQLFEENPINASGVDAKAILSARLSKSRRLENLIAQLPGEKKNGLFGNLIALSLGLTPNFKSNFDLAEDAKLQLSKDTYDDDLDNLLAQIGDQYADLFLAAKNLSDAILLSDILRVNTEITKAPLSASMIKRYDEHHQDLTLLKALVRQQLPEKYKEIFFDQSKNGYAGYIDGGASQEEFYKFIKPILEKMDGTEELLVKLNREDLLRKQRTFDNGSIPHQIHLGELHAILRRQEDFYPFLKDNREKIEKILTFRIPYYVGPLARGNSRFAWMTRKSEETITPWNFEEVVDKGASAQSFIERMTNFDKNLPNEKVLPKHSLLYEYFTVYNELTKVKYVTEGMRKPAFLSGEQKKAIVDLLFKTNRKVTVKQLKEDYFKKIECFDSVEISGVEDRFNASLGTYHDLLKIIKDKDFLDNEENEDILEDIVLTLTLFEDREMIEERLKTYAHLFDDKVMKQLKRRRYTGWGRLSRKLINGIRDKQSGKTILDFLKSDGFANRNFMQLIHDDSLTFKEDIQKAQVSGQGDSLHEHIANLAGSPAIKKGILQTVKVVDELVKVMGRHKPENIVIEMARENQTTQKGQKNSRERMKRIEEGIKELGSQILKEHPVENTQLQNEKLYLYYLQNGRDMYVDQELDINRLSDYDVDAIVPQSFLKDDSIDNKVLTRSDKNRGKSDNVPSEEVVKKMKNYWRQLLNAKLITQRKFDNLTKAERGGLSELDKAGFIKRQLVETRQITKHVAQILDSRMNTKYDENDKLIREVKVITLKSKLVSDFRKDFQFYKVREINNYHHAHDAYLNAVVGTALIKKYPKLESEFVYGDYKVYDVRKMIAKSEQEIGKATAKYFFYSNIMNFFKTEITLANGEIRKRPLIETNGETGEIVWDKGRDFATVRKVLSMPQVNIVKKTEVQTGGFSKESILPKRNSDKLIARKKDWDPKKYGGFDSPTVAYSVLVVAKVEKGKSKKLKSVKELLGITIMERSSFEKNPIDFLEAKGYKEVKKDLIIKLPKYSLFELENGRKRMLASAGELQKGNELALPSKYVNFLYLASHYEKLKGSPEDNEQKQLFVEQHKHYLDEIIEQISEFSKRVILADANLDKVLSAYNKHRDKPIREQAENIIHLFTLTNLGAPAAFKYFDTTIDRKRYTSTKEVLDATLIHQSITGLYETRIDLSQLGGDSGGSSGGSSGSETPGTSESATPESSGGSSGGSSKWESRFELKPGKWVFVPTDETIEQGREIKELIEKRWKAPSYYYHLRQGGHVAALKQHLGHTCFIHVDIEDFFGSINRSEITRALKGYFSPEEAREIATESTVRHPEDAERYILPFGFVQSPILASLCLRKSALGRYLHQLSKQDGVVVSVYVDDIIISGNDPERLEQVLEDIKAAAEESGFPLNEEKQQGPAETITAFNIELSQNSLEITPERMAEFRDAMQQSTNEHQREGILGYVRSVNPAQASGGSKRTADGSEFEPKKKRKV

SEQ ID NO: 1593 - protein, 1685 aa, synthetic construct
MKRTADGSEFESPKKKRKVDKKYSIGLDIGTNSVGWAVITDEYKVPSKKFKVLGNTDRHSIKKNLIGALLFDSGETAEATRLKRTARRRYTRRKNRICYLQEIFSNEMAKVDDSFFHRLEESFLVEEDKKHERHPIFGNIVDEVAYHEKYPTIYHLRKKLVDSTDKADLRLIYLALAHMIKFRGHFLIEGDLNPDNSDVDKLFIQLVQTYNQLFEENPINASGVDAKAILSARLSKSRRLENLIAQLPGEKKNGLFGNLIALSLGLTPNFKSNFDLAEDAKLQLSKDTYDDDLDNLLAQIGDQYADLFLAAKNLSDAILLSDILRVNTEITKAPLSASMIKRYDEHHQDLTLLKALVRQQLPEKYKEIFFDQSKNGYAGYIDGGASQEEFYKFIKPILEKMDGTEELLVKLNREDLLRKQRTFDNGSIPHQIHLGELHAILRRQEDFYPFLKDNREKIEKILTFRIPYYVGPLARGNSRFAWMTRKSEETITPWNFEEVVDKGASAQSFIERMTNFDKNLPNEKVLPKHSLLYEYFTVYNELTKVKYVTEGMRKPAFLSGEQKKAIVDLLFKTNRKVTVKQLKEDYFKKIECFDSVEISGVEDRFNASLGTYHDLLKIIKDKDFLDNEENEDILEDIVLTLTLFEDREMIEERLKTYAHLFDDKVMKQLKRRRYTGWGRLSRKLINGIRDKQSGKTILDFLKSDGFANRNFMQLIHDDSLTFKEDIQKAQVSGQGDSLHEHIANLAGSPAIKKGILQTVKVVDELVKVMGRHKPENIVIEMARENQTTQKGQKNSRERMKRIEEGIKELGSQILKEHPVENTQLQNEKLYLYYLQNGRDMYVDQELDINRLSDYDVDAIVPQSFLKDDSIDNKVLTRSDKNRGKSDNVPSEEVVKKMKNYWRQLLNAKLITQRKFDNLTKAERGGLSELDKAGFIKRQLVETRQITKHVAQILDSRMNTKYDENDKLIREVKVITLKSKLVSDFRKDFQFYKVREINNYHHAHDAYLNAVVGTALIKKYPKLESEFVYGDYKVYDVRKMIAKSEQEIGKATAKYFFYSNIMNFFKTEITLANGEIRKRPLIETNGETGEIVWDKGRDFATVRKVLSMPQVNIVKKTEVQTGGFSKESILPKRNSDKLIARKKDWDPKKYGGFDSPTVAYSVLVVAKVEKGKSKKLKSVKELLGITIMERSSFEKNPIDFLEAKGYKEVKKDLIIKLPKYSLFELENGRKRMLASAGELQKGNELALPSKYVNFLYLASHYEKLKGSPEDNEQKQLFVEQHKHYLDEIIEQISEFSKRVILADANLDKVLSAYNKHRDKPIREQAENIIHLFTLTNLGAPAAFKYFDTTIDRKRYTSTKEVLDATLIHQSITGLYETRIDLSQLGGDSGGSSGGSSGSETPGTSESATPESSGGSSGGSSKWESRFELKPGKWVFVPTDETIEQGREIKELIEKRWKAPSYYYHLRQGGHVAALKQHLGHTCFIHVDIEDFFGSINRSRITRALKGYFSPEEAREIATESTVRHPEDAERYILPFGFVQSPILASLCLRKSALGRYLHQLSKQDGVVVSVYVDDIIISGNDPERLEQVLEDIKAAAEESGFPLNEEKQQGPAETITAFNIELSQNSLEITPERMAEFRDAMQQSTNEHQREGILGYVRSVNPAQASGGSKRTADGSEFEPKKKRKV

SEQ ID NO: 1594 - protein, 1685 aa, synthetic construct
MKRTADGSEFESPKKKRKVDKKYSIGLDIGTNSVGWAVITDEYKVPSKKFKVLGNTDRHSIKKNLIGALLFDSGETAEATRLKRTARRRYTRRKNRICYLQEIFSNEMAKVDDSFFHRLEESFLVEEDKKHERHPIFGNIVDEVAYHEKYPTIYHLRKKLVDSTDKADLRLIYLALAHMIKFRGHFLIEGDLNPDNSDVDKLFIQLVQTYNQLFEENPINASGVDAKAILSARLSKSRRLENLIAQLPGEKKNGLFGNLIALSLGLTPNFKSNFDLAEDAKLQLSKDTYDDDLDNLLAQIGDQYADLFLAAKNLSDAILLSDILRVNTEITKAPLSASMIKRYDEHHQDLTLLKALVRQQLPEKYKEIFFDQSKNGYAGYIDGGASQEEFYKFIKPILEKMDGTEELLVKLNREDLLRKQRTFDNGSIPHQIHLGELHAILRRQEDFYPFLKDNREKIEKILTFRIPYYVGPLARGNSRFAWMTRKSEETITPWNFEEVVDKGASAQSFIERMTNFDKNLPNEKVLPKHSLLYEYFTVYNELTKVKYVTEGMRKPAFLSGEQKKAIVDLLFKTNRKVTVKQLKEDYFKKIECFDSVEISGVEDRFNASLGTYHDLLKIIKDKDFLDNEENEDILEDIVLTLTLFEDREMIEERLKTYAHLFDDKVMKQLKRRRYTGWGRLSRKLINGIRDKQSGKTILDFLKSDGFANRNFMQLIHDDSLTFKEDIQKAQVSGQGDSLHEHIANLAGSPAIKKGILQTVKVVDELVKVMGRHKPENIVIEMARENQTTQKGQKNSRERMKRIEEGIKELGSQILKEHPVENTQLQNEKLYLYYLQNGRDMYVDQELDINRLSDYDVDAIVPQSFLKDDSIDNKVLTRSDKNRGKSDNVPSEEVVKKMKNYWRQLLNAKLITQRKFDNLTKAERGGLSELDKAGFIKRQLVETRQITKHVAQILDSRMNTKYDENDKLIREVKVITLKSKLVSDFRKDFQFYKVREINNYHHAHDAYLNAVVGTALIKKYPKLESEFVYGDYKVYDVRKMIAKSEQEIGKATAKYFFYSNIMNFFKTEITLANGEIRKRPLIETNGETGEIVWDKGRDFATVRKVLSMPQVNIVKKTEVQTGGFSKESILPKRNSDKLIARKKDWDPKKYGGFDSPTVAYSVLVVAKVEKGKSKKLKSVKELLGITIMERSSFEKNPIDFLEAKGYKEVKKDLIIKLPKYSLFELENGRKRMLASAGELQKGNELALPSKYVNFLYLASHYEKLKGSPEDNEQKQLFVEQHKHYLDEIIEQISEFSKRVILADANLDKVLSAYNKHRDKPIREQAENIIHLFTLTNLGAPAAFKYFDTTIDRKRYTSTKEVLDATLIHQSITGLYETRIDLSQLGGDSGGSSGGSSGSETPGTSESATPESSGGSSGGSSKWESRFELKPGKWVFVPTDETIEQGREIKELIEKPWKAPSYYYHLRQGGHVAALKQHLGHTCFIHVDIEDFFGSINRSRITRALKGYFSYEEAREIATESTVRHPEDAERYILPFGFVQSPILASLCLRKSALGRYLHQLSKQDGVVVSVYVDDIIISGNDPERLEQVLEDIKAAAEESGFPLNEEKQQGPAETITAFNIELSQNSLEITPERHAEFRDAMQQSTNEHQREGILGYVRSVNPAQASGGSKRTADGSEFEPKKKRKV

SEQ ID NO: 1595 - protein, 251 aa, synthetic construct
DKWKHKFELKENRWVYVPSEEMLKFGKKIHQYIRHKWKYPLYMYHLRDGGHVAAAKLHIKNDYFSLIDISDFFGSTSQSRVTDELKKLIPYAKAREIAKLSTVRIPNANGLKHAIPYGYPQSPILATLMFHNSYCGGVINTINKSGHVTVSVYMDDIILSSDDLAQLNQAFDTVCEALRKSRYEVNENKTQSPSTMINVFNLELSGNSLRVSPERMVQFIQAYVKSDNEHERKGIASYVHSVNPGQARLHF

SEQ ID NO: 1596 - protein, 251 aa, synthetic construct
DKWKHKFELKENRWVYVPSEENLKFGKKIHQYVRHKWKYPLYMYHLRDGGHVAAAKLHIKNDYFSLIDISDFFGATSQSRVTDELKKLIPYAKAREIAKLSTVRIPNANGLKHAIPYGYPQSPILATLMFHNSYCGGVINTINKSGHVTVSVYMDDIILSSDDLAQLNQAFDTVCEALRKSRYEVNENKTSSPSTMTNVFNLELSGNSLRVSPERMVQFIQAYVKSDNEHERKGIASYVHSVNPDQARLHF

SEQ ID NO: 1597 - protein, 251 aa, synthetic construct
DKWKHKFELKENRWVYVPSEEMLKFGKKIHQYIRHKWKYPLYMYHLRDGGHVAAAKLNIKNDYFSLIDISDFFGSTSQSRVTDELKKLIPYAKAREIAKLSTVRIPNAPGLKHAIPYGYPQSPILATLMFHNSYCGGVINTINKSGHVTVSVYMDDIILSSDDLAQLNQAFDTVCEALRKSRYEVNENKTQSPSTMINVFNLELSGNSLRVSPERMIQFIQAYVKSDNEHERCGIASYVHSVNPDQARLHF

SEQ ID NO: 1598 - protein, 251 aa, synthetic construct
DKWKHKFELKENRWVYVPSEEMLKFGKKDHQYIRHKWKYPLYMYHLRDGGHVAAAKLHIKSDYFSLIDISDFFGSTSQSRVTDELKKLIPYAKAREIAKLSTVRIPNANGLKHAIPYGYPQSPILATLMFHNSYCGGVINTINKSGHVTVSVYMDDIILSSDDLAQLNQAFDTVCEALRKSRYEVNENKTQSPSTMINVFNLELSGNSLRVSAERMVQFIQAYVKSDNEHERKGIASYVHSVNPPQARLHF

SEQ ID NO: 1599 - protein, 251 aa, synthetic construct
DKWKHKFELKENRWVYVPSEEMLKFGKKIHQYIRHKWKYPLYMYHLRDGGHVAAAKLHIKNDYFSLIDISDFFGSTSQSRVTDELKKLIPYAKAREIAKLSTVRIPNANGLKHAIPYGYPQSPILATLMFHNSYCGGVINTINKSGHVTVSVYMDDIILSSDDLAQLNQWFDTVCEALRKSRYEVNENKTQSPSTMINVFNLELSGNSLRVSPERMVQFIQAYVKSDNEHERKGIASYVHSVNPDQARLPF

SEQ ID NO: 1600 - protein, 251 aa, synthetic construct
DKWKHKFELKENRWVTVPSEEMLKFGKKIHQYIRHKWKYPLYMYHLEDGGHVAAAKLHIKNDYFSLIDISDFYGSTSQSRVTDELKKLIPYAKAREVAKLSTVRIPNANGLKHAIPYGYPQSPILATLMFHNSYCGGVINTINKSGHVTVSVYMDDIILSSDDLAQLTQAFDTVCEALRKSRYEVNENKTQSPSTMINVFNLELSGNSLRVSPERMVQFIQAYVKSDNEHERSGIASYVHGVNPDQARLHF

SEQ ID NO: 1601 - protein, 251 aa, synthetic construct
DKWKHKFELKENKWVYVPSEEMLKFGKKIHQYIRHKWKYPLYMYHLRDGGHVAAAKLHIKNDYFSLIDISDFFGSTSQSRVTDELKKLIPYAKAREIAKLSTVWIPNANGLKHAIPYGYPQSPILATLMFHNSYCGGVINTINKSGHVTVSVYMDDIILSSDDLAQLNQAFDTVCEALIKSRYEVNENKTQSPSTMINVFNLELSGNSLRVSPERMVQFIQAYVKSDNEHERKGIASYVHSVNPDQARLHF

SEQ ID NO: 1602 - protein, 251 aa, synthetic construct
DKWKHKFELKENRWVTVPSEEMLKFGKKIHQYIRHKWKYPLYMYHLEDGGHVAAAKLHIKNDYFSLIDISDFYGSTSQSRVTDELKKLIPYAKAREIAKLSTVRIPNANGLKHAIPYGYPQSPILATLMFHNSYCGGVINTINKSGHVTVSVYMDDIILSSDDLAQLTQAFDTVCEALRKSRYEVNENKTQSPSGMINVFNLELSGNSLRVSPERMVQFIQAYVKSDNEHERSGIASYVHGVNPDQARLHF

SEQ ID NO: 1603 - protein, 251 aa, synthetic construct
DKWKHKFELKENRWVYVPSETMLKFGKKIHQYIRHKWKYPLYMYHLRDGGHVAAAKLHIKNDYFSLIDISDFFGSTSQSRVTDELKKLIPYAKAREIAKLSTVRIPNANGLKHAIPYGYPQSPILATLMFHNMYCGGVINTINKSGHVTVSVYMDDIILSSDDLAQLNQAFDTVCEALRKSRYEVNENKTQSPSTMINVFNLELSGNSLRVSPEEMVQFIQAYVKSDNEHERKGIASYVHSVNPDQARLHF

SEQ ID NO: 1604 - protein, 251 aa, synthetic construct
DKWKHKFELKENRWVYVPSEECLKFGKKIHQYIGHKWKYPLYMYHLRDGGHVAAAKLHIKNDYFSLIDISDFFGSTSQSRVTDELKKLIPYAKAREIAKLSTVRIPNANGLKHHIPYGYPQSPILATLMFHNSYCGGVINTINKSGHVTVSVYMDDIILSSDDLAQLNQAFDTVCEALRKSRYEVNENKTQSPSTMINVFNLELSGNSLRVSPSRMVQFIQAYVKSDNEHERKGIASYVHSVNPDQARLHM

SEQ ID NO: 1605 - protein, 251 aa, synthetic construct
DKWKHKFELKENRWVYVPSEEMLKFGKKIHQYIRHKWKYPLYMYHLRDGGHVAAAKLHIKNDYFSLIDISDFFGSTSQSRVTDELKKLIPYAKAREIAKLSTVRIPNANGLKHAIPYGLAQSPILATLMFHNSYCGGVINTINKSGHVTVSVYMDDIILSSDDLAQLNQAFDTVCEALRKSRYEVNENKTQSPSTMINVFNLELSGNSLRVSPERMVQFIQAYVKSDNEHERKGIASYVHSVNPDQARLHF

SEQ ID NO: 1606 - protein, 251 aa, synthetic construct
DKWKHKFELKENRWVYVPSEEMLKFGKKIHQYIRHKWKYPLYMYHLRDGGHVAAAKLHIKNDYFSLIDISDFFGSTSQSRVTDELKKLIPYAKAREIAKLSTVRIPNANGLKHAIPYGYPQSPILATLMFHNSYCGGVINTINKSGHVTVSVYMDDIILSSDDLAQLNQAFDTVCEALRKSRYEVNENKTQSPSTMINVFWLELSGNSLRVSPERMVQFIQAYVKSDNEHEAKGIAQYVHSVNPDQARLHF

SEQ ID NO: 1607 - protein, 251 aa, synthetic construct
DKWKHKFELKENRWVYVPSEEMLKFGKKIHQYIRHKWKYPLYMYHLRDGGHVAAAKLHIKNDYFSLIDISDFFGSRSQSRVTRELKKLIPYAKAREIAKLSTVRIPNANGLKHAIPYGYPQSPILATLCFHNSYCGGVINTINKSGHVTVSVYMDDIILSSDDLAQLNQAFDTVCEALRKSRYEVNENKTQSPSTMINVFNLELSGNSLRVSPERMVQFIQAYVKSDNEHERKGIASYVHSVNPDQARLHF

SEQ ID NO: 1608 - protein, 251 aa, synthetic construct
DKWKHKFELKENRWVYVPSEEMLKFGKKIHQYIRHKWKYPLYMYHLRDGGHVAAAKLHIKNDYFSLIDISDLFGSTSQSRVTDELKKLIPYAKAREIAKLSTVRIPNANGLKHAIPYGYPQSPILATLMFHNSYCGGVINTINKSGHVTVSVYMDDIILSSCDLAQLNQAFDTVCEALRKSRYEVNENKTQSPSTMINVFNLELSGNSLRVSPERMVQFIQAYVKSDNEHERKGIASYVHSVTPDPARLHF

SEQ ID NO: 1609 - protein, 251 aa, synthetic construct
DKWKHKFELKENRRVYVPSEEMLKFGKKIHQYIRHKWKYPLYMVHLRDGGHVAAAKLHIKNDYFSLIDISDFFGSTSQSRVTDELKKLIPYAKVREIAKLSTVRIPNANGLKHAIPYGYPQSPILATLMFHNSYCGGVINTINKSGHVTVSVYMDDIILSSDDLAQLNQAFDTVCEALRKSRYEVNENKTQSPSTMINVFNLELSGNSLRVSPERMVQFIQAYVKSDNEHERKGIASYVHSVNPDQARLHF

SEQ ID NO: 1610 - protein, 251 aa, synthetic construct
DKWKHKFELKENRWVTVPSEEMLKFGKKIHQYIRHKWKYPLYMYHLEDGGHVAAAKLHIKNDYFSLIDISDFYGSTSQSRVTDELKKLIPYAKAREVAKLSTVRIPNANGLKHAIPYGYPQSPILATLMFHNSYCGGVINTINKSGHVTVSVYMDDIILSSDDLAQLTQAFDTVCEALRKSRYEVNENKTQSPSGMINVFNLELSGNSLRVSPERMVQFIQAYVKSDNEHERKGIASYVHGVNPDQARLHF

SEQ ID NO: 1611 - protein, 251 aa, synthetic construct
DKWKHKFELKENRWVTVPSEEMLKFGKKIHQYIRHKWKYPLYMYHLEDGGHVAAAKLHIKNDYFSLIDISDFFGSTSQSRVTDELKKLIPYAKAREIAKLSTVRIPNANGLKHAIPYGYPQSPILATLMFHNSYCGGVINTINKSGHVTVSVYMDDIILSSDDLAQLTQAFDTVCEALRKSRYEVNENKTQSPSGMINVFNLELSGNSLRVSPERMVQFIQAYVKSDNEHEWSGIASYVHGVNPDQARLHF

SEQ ID NO: 1612 - protein, 251 aa, synthetic construct
DKWKHKFELKENRWVYVPSEEMLKFGKKIHQYIRHKWKYPLYMYHLRDGGHVAAAKLHIKNDYFSLVDISDIFGSTSQTRVTDELKKLIPYAKAREIAKLSTVRIPNANGLKHAIPYGYPQSPILATLMFHNSYCGGVINTINKSGHVTVSVYMDDIILSSDDMAQLNQAFDTVCEALRKSRYEVNENKTQSPSTMINVFNLELSGNSLRVSPERMVQFIQAYVKSDNEHERKGIASYVHSVNPDQARLHF

SEQ ID NO: 1613 - protein, 251 aa, synthetic construct
DKWKHKFELKENRWVYVPSEEMLKFGKKIHQYIRHKWKYPLYMYHLRDGGHVAAAKLHIKNDYFSLIDISDFFGSTSQSRVTDELKKLIPYAKAREIAKLSTVRIPNANGLKHAIPYGYPQSPILATLMFHNSYCGGVINTINKSGHVTVSVYMDDIILSPDDLAQLNQAFDTVCEALRKSRYEVNENKTQSPSTMINVFNLELSGNSLRVSPERMVQFIQAYVKSDNEHERKGCASYVWSVNPDQARLHF

SEQ ID NO: 1614 - protein, 251 aa, synthetic construct
DKWKHKFELKENRWVYVPSEEMLKFGKKIKQYIRHKWKYPLYMYHLRDGGHVAAAKLHIKNDYFSLIDISDFFGSTSQSRVTDELKKLIPYAKAREIAKLSTVRIPNANGLKHAIPYGYPQSPILATLMFHNSYCGGVINTINKSGHVTVSVYMDDITLSSDDLAQLNQAFDTVCEALRKSRYEVNENKTQSPSTMINVFNLELSGNSLRVSPERMVQFIQAYVPSDNEHEDKGIASYVHPVNPDQARLHF

SEQ ID NO: 1615 - protein, 251 aa, synthetic construct
DKWKHKFELKENRWVYVPSEEMLKFGKKIHQYIRHKWKYPLYMYHLRDGGHVAAAKLHEKNDYFSLIDISDFFGSTMQSRVTDELKKLIPYAKAREIAKLSTVRIPNANGLKHAIPYGYPQSPILATLMFHNSYCGGVINTINKSGHVTVSVYMDDIILSSDDLAQLNQAFDTVCEALRKSRYEVNENKTQSPSTMINVFNLELSGNSLRVSPERPVWFIQAYVKSDNEHERKGIASLVHSVNPDQARLHF

SEQ ID NO: 1616 - protein, 251 aa, synthetic construct
DKWKHAFELKENRWVYVPSEEMLKFGKKIHQYIRHKWKYPLYMYHLRDGGHVAAAKLHIKNDYFSLIDISDFFGSTSQSRVTDELKKLIPYAKAREIAKLSTVRIPNANGLKHAIPYGYPQSPILATLMFHNSYCGGVINTINKSGHVTVSVYMDDIILSSDDLAQLNQAFDTVCEALRKSRYEVNENKTQSPSTMINNFNLELSGNSLRVSPERMVQFIQAYVKSDMEHERKGIASYVHSVNPDQARLHF

SEQ ID NO: 1617 - protein, 251 aa, synthetic construct
DKWKHKFELKENRWVYVPSEEMLKFGKKIHQYIMHKWKYPLYMYHLRDGGHVAAAKLHIKNDYFSLIDISDFFGSTSQSRVTDELKKLIPYAKAREIAILSTVRIPNANGLKHAIPYGYPQSPILATLMFHNSYCGGVINTINKSGHVTVSVYMDDIILSSDDLAQLHQAFDWVCEALRKSRYEVNENKTQSPSTMINVFNLELSGNSLRVSPERMVQFIQAYVKSDNEHERKGIASYVHSVNPDQARLHF

SEQ ID NO: 1618 - protein, 251 aa, synthetic construct
DKWKHKFELKENRWVYVPSEEMLKFGKKIHQYIRHKWKYPLYMYHLRDGGHVAAAKLHIKNDYFSLIDYSDFFGSTSQSRVTDELKKLIPYAKAREIAKLSTVRLPNANGLKHAIPYGYPQSPILATLMFHNSYCGGVINTINKSGHVTVSVYMDDIILSSDDLAQLNQAFDTVCEALRGSRYEVNENKTQSPSTMINVFNLELSGNSLRVSPERMVQFIQAYVKSDTEHERKGIASYVHSVNPDQARLHF

SEQ ID NO: 1619 - protein, 251 aa, synthetic construct
DKWKHKFELKENRWVYVPSEEMLKFGKKIHQYIRHKWKYPLYMVHLTDCGHVAAAKLHIKNDYFSLIDISDFFGSTSQSRVTDELKKLIPYAKAREIAKLSTVRIPNANGLKHAIPYGYPQSPILATLMFHNSYCGGVINTINKSGHVTVSVYMDDIILSSDDLAQLNQAFDTVCEALRKSRYEVNENKTQSPSTMINVFNLELSGNSLRVSPERMVQFIQAYVFSDNEHERKGIASYVHSGNPDQARLHF

SEQ ID NO: 1620 - protein, 251 aa, synthetic construct
DKWKHKFELKENRWVYVPSEEMLKFGDKIHQYIRHKWKYPLYMYHLRDGGHVAAAKLHIKNDYLSLIDISDFFGSTSQSRVTDELKKLIPYAKAREIAKLSTVRIPNANGLKHAIPYGYPDSPILATLMFHNSYCGGVINTINKSGHVTVSVYMDDIILSSDDLAQLNQAFDTVCEALRKSRYEVNENKTQSPSTMINVFNLELSGNSLRVSPERMVQFIQAYVKSDNEHERKGIASYVHVVNPDQAFLHF

SEQ ID NO: 1621 - protein, 251 aa, synthetic construct
DKWKHKFELKENRWVTVPSEEMLKFGKKIHQYIRHKWKYPLYMYHLEDGGHVAAAKLHIKNDYFSLIDISYFFGSTSQSRVTDELKKLIPYAKAREIAKLSTVRIPNANGLKHAIPYGYPQSPILATLMFHNSYCGGVINTINKSGHVTVSVYMDDIILSSDDLAQLTQAFDTVCEALRKSRYEVNENKTQSPSGMINVFNLELSGNSLRVSPERMVQFIQAYVKSDNEHERSGIASYVHGVNPDQARLHF

SEQ ID NO: 1622 - protein, 251 aa, synthetic construct
DKWKHKFELKENRWVYVPSEEMLKFGKKIHQYIRHKWKYPLYMYHLRDGGHVAAAKLHIKNDCFSLIDISDFFGSTSQSRVTDELKKLIPYAKAREIAKLSTVRIPNANGLKHAIPYGYPQSPILATLMFHNSYCGGVINTINKSGHVTVSVYMDDIQLSSDDLAQLNQAFDTVCEALEKSRYEVNENKTQSPSTMINVFNLELSGNSLRVSPERMVQFQQAYVKSDNEHERKGIASYVHSPNPDQARLHF

SEQ ID NO: 1623 - protein, 251 aa, synthetic construct
DKWKHKFELKENRWVYVPSEEMLKFGKKIHQYIRHKWGYPLYMYHLRDGGHVAAAKLHIKNDYFSLIDIMDFFGSTSQSRVTDELKKLIPYAKAREIAKYSTVRIPNANGLKHAIPYGYPQSPILATLMFHNSYCGGVINTINKSGHVTVSVYMDDIILSSDDLAQRNQAFYTVCEALRKSRYEVNENKTQSPSTMINVFNLELSGNSLRVSPERMVQFIQAYVKSDNEHERKGIASYVHSVNPDQARLHF

SEQ ID NO: 1624 - protein, 251 aa, synthetic construct
DKWKHKFELKENRWVYVPSEEMLKFGKQIHQYPRHKWKYPLYMYHLRDGGHVAAAKDHIKNDYFSLIDISDFFGSTSQSRVTDELKKLIPYAKAREIAKLSTVRIPNANGLKHAIPYGYPQSPILATLMFHNSYCGGVINTINKSGHVTVSVYMDDIILSSDDLAQLNQAFDTVCEALRKSRYEVNENKTQSPSTMINVFNLELSGNSLRVSPERMVQFIQAYVYSDNEHERKGIASYVHSVNNDQARLHF

SEQ ID NO: 1625 - protein, 251 aa, synthetic construct
DKWKHKFELKENRWVYVPSEEMLKFPKKIHQYMRHKWKYPLYMYHLRDGGHVAAAKLHIKNDYFSLIDISDFFGSTSQSRVTDELKKLIPYAKAREIAKLSTVRIPNANGLKHAIPYGYPQSPILATLMFHNSYCGGVINTINKSGHVTVSVYMDDIILSSDDLAQLGQAFDTVCEALRKSRYEVNENKTQSPSTMINVFNLELSGNSLRVSPERMVQFQQAYVKSDNEHERKGIASYVHSVNPDQARLHF

SEQ ID NO: 1626 - protein, 251 aa, synthetic construct
DKWKHKFELKENTWVYVPSEEMLKFGKLIHQYWRHKWKYPLYMYHLRDGGHVAAAKLHIKNDYFSLIDISDFFGSTSQSRVTDELKKLIPYAKAREIAKLSTVRIPNANGLKHAIPYGYPQSPILATLMFENSYCGGVINTINKSGHVTVSVYMDDIILSSDDLAQLNQAFDTVPEALRKSRYEVNENKTQSPSTMINVFNLELSGNSLRVSPERMVQFIQAYVKSDNEHERKGIASYVHSVNPDQARLHF

SEQ ID NO: 1627 - protein, 251 aa, synthetic construct
DKWKHKFELKENRWVYVPSEEMLKFMKKIHQYIRHKWKYPLYMYHLRDGGHVAAAKLHIKNDYFSLIDISDFFGSTSQSRVTDELKKLIPYAKAREIAKLSTVRIPNANGLKHAIPYGYPQSPILATLMFHNSYCGGVINTINKSGHVTESVYMDDIILSSDDLAQLNQAFDTGCEALRKSRYEVNENGTQSPSTMINVFNLELSGNSLRVSPERMVQFIQAYVKSDNEHERKGIASYVHSVNPDQARLHF

SEQ ID NO: 1628 - protein, 251 aa, synthetic construct
DKWKHKFELKENRWVYVPSEEMLKFIKEIHQYIRHKWKYPLYMYHLRDGGHVAAAKLHIKNDYFSLIDISDFFGSTSQSRVTDELKKLIPYAKAREIAKLSTVRIPNANGLKHAIPYGYPQSPILATLMFHNSYCGGVINTINKSGHVTVSVYMDDIILSSDDLAQLNNAFDTVCEALRKSRYEVNENKTQSPSTMINVFNLELSGNSLRVSPERMVQFIQAYVKSDNEHERKGIASYVHSVNMDQARLHF

SEQ ID NO: 1629 - protein, 251 aa, synthetic construct
DKWKHKFELKENRRVYVPSEEMLKFGKKIHQYIRHKWKYPLYMYHLRDGGHVAAAKLHIKNDYFSLIDISDFFGSTSQSRVTDELKKLIPYAKAREIAKLSTVRIPNANGLKHARPYGYPQSPILATLMFHNSYCGGVINTINKSGHVTVSVYMDDIILSSDDLAQNNQAFDTVCEALRKSRYEVNETKTQSPSTMINVFNLELSGNSLRVSPERMVQFIQAYVKSDNEHERKGIASYVHSVNPDQARLHF

SEQ ID NO: 1630 - protein, 251 aa, synthetic construct
DKWKHKFELKENRWVYVPSEEMLKFGKKIHQYIRHKWKYPLYMYHLRDGGHVAAAKLHIKNDYFSLIDISDFFGSTSQSRVTDELKKLIPYAKAREIAKLSTVRIPNANGLKHAIPYGYPQSPILATLMFHNSYCGGVLNTINKSAHVTVSVYMDDIILCSDDLAQLNQAFDTVCEALRKSRYYVNENKTQSPSTMINVFNLELSGNSLRVSPERMVQFIQAYVKSDNEHERWGIASYVHSVNPDQARLHF

SEQ ID NO: 1631 - protein, 251 aa, synthetic construct
DKWKHKFELKENRWVYVPSEEMLKFGKKIHQYIRHKWKYPLYMYHLRDGGHVAAAKLHIKNDYFSLIDISDFFGSTSQSRVTDELKKLIPYAKAREIAKLSTVRIPNANGLKHAIPYGYPQSPILATLMFHNSYCGGVINTINKSGHVTVSVYMDDIILSSDDLAQLNQAFDTVCEALRKSRYEVNENKTQSPSTMINVFNLELSHNSLRVSPERMVQFIQAYVKSDNEHERKGIASYVHSVNPDQARLHF

SEQ ID NO: 1632 - protein, 251 aa, synthetic construct
DKWKHKFELKENRWVYVPSEEMLKFGKKIHQYIRHKWKYPLYMYHLRDGGHVAAAKLHIKNDYFSLIDISDFFGSTSQSRVTDELKKLIPYAKAREIAKLSTVRIPNANGLKHAIPYGYPQSPILATLLFHNSYCGGVINTINKSGHVTVSVYMDDIILSSDDLAQLNQAFDTVCEALRKSRYEVNENKTQSPSTMINVFNLELSHNSLRVSPERMVQFIQAYVKSDNEHERKGIASYVHSVNPDQARLHF

SEQ ID NO: 1633 - protein, 251 aa, synthetic construct
DKWKHKFELKENRWVYVPSEEMLKFGKKIHQYIRHKWKYPLYMYHLRDGGHVAAAKLHIKNDYFSLIDISDFFGSTSQSRVTEELKKLIPYAKAREIAKLSTVRIPNANGLKHAIPYGYPQSPILATLMFHNSYCGGVINTINKSGHVTVSVYMDDIILSSDDLAQLNQAFDTVCEALRKSRYEVNENKTQSPSTMINVFNLELSHNSLRVSPERMVQFIQAYVKSDNEHERKGIASYVHSVNPDQARLHF

SEQ ID NO: 1634 - protein, 251 aa, synthetic construct
DKWKHKFELKENRWVYVPSEEMLKFGKKIHQYIRHKWKYPLYMYHLRDGGHVAAAKLHIKNDYFSLIDISDFFGSTSQSRVTEELKKLIPYAKAREIAKLSTVRIPNANGLKHAIPYGYPQSPILATLLFHNSYCGGVINTINKSGHVTVSVYMDDIILSSDDLAQLNQAFDTVCEALRKSRYEVNENKTQSPSTMINVFNLELSHNSLRVSPERMVQFIQAYVKSDNEHERKGIASYVHSVNPDQARLHF

SEQ ID NO: 1635 - protein, 251 aa, synthetic construct
DKWKHKFELKENRWVYVPSEEMLKFGKKIHQYIRHKWKYPLYMYHLRDGGHVAAAKLHIKNDYFSLIDISDFFGSTSQSRVTRELKKLIPYAKAREIAKLSTVRIPNANGLKHAIPYGYPQSPILATLCFHNSYCGGVINTINKSGHVTVSVYMDDIILSSDDLAQLNQAFDTVCEALRKSRYEVNENKTQSPSTMINVFNLELSGNSLRVSPERMVQFIQAYVKSDNEHERKGIASYVHSVNPDQARLHF

SEQ ID NO: 1636 - protein, 251 aa, synthetic construct
DKWKHKFELKENRWVYVPSEEMLKFGKKIHQYIRHKWKYPLYMYHLRDGGHVAAAKLHIKNDYFSLIDISDFFGSTSQSRVTDELKKLIPYAKAREIAKLSTVRIPNANGLKHAIPYGYPQSPILATLMFHNSYCGGVINTINKSGHVTVSVYMDDIILSSDDLAQLNQAFDTVCEALRKSRYEVNENKTQSPSTMINVFNLELSGNSLRVSPERMVQFIQAYVKSDNEHERKGIASYVHSVNPDQARLHF

SEQ ID NO: 1637 - protein, 251 aa, synthetic construct
DKWKHKFELKENRWVYVPSEEMLKFGKKIHQYIRHKWKYPLYMYHLRDGGHVAAAKLHIKNDYFSLIDISDFFGSTSQSRVTDELKKLIPYAKAREIAKLSTVRIPNANGLKHAIPYGYPQSPILATLLFHNSYCGGVINTINKSGHVTVSVYMDDIILSSDDLAQLNQAFDTVCEALRKSRYEVNENKTQSPSTMINVFNLELSGNSLRVSPERMVQFIQAYVKSDNEHERKGIASYVHSVNPDQARLHF

SEQ ID NO: 1638 - protein, 251 aa, synthetic construct
DKWEHKFELKENRWVYVPSEEMLKFGKKIHQYIRHKWKYPLYMYHLRDGGHVAAAKLHIKNDYFSLIDISDFFGSTSQSRVTDELKKLIPYAKAREIAKLSTVRPPNANGLKHAIPYGYPQSPILATLMFHNSYCGGVINTINKSGHVTVSVYMDDIILSSDDLAQLNQAFDTVCEALRKSRYEVNENKTQSPSTMINVFNLELSGNSLRVSPERGVQFIQAYVKSDNEHERKGIASYVHSVNQDQARLHF

SEQ ID NO: 1639 - protein, 251 aa, synthetic construct
DKWKHKNELKENRWVYVPSEEMLKFGKKIHQYIRHKWKYPLYMYHLRDGGHVAAAKLHIKNDYFSLIDISDFFGSTSQSRVTDELKKLIPYAKAREIAKLSTVRIPNANGLKHAIPYGYPQSPILATLMFHNSYCGGVINTINKSGHVTVSVYMDDIILSSDDLAQLNQAFDTVCEALRKSRYEVNENKTQSPSTMINVFNLELSHNSLRVSPERMVQFIQAYVKSDNEHERKGIASYVHSVNPDQARLHF

SEQ ID NO: 1640 - protein, 251 aa, synthetic construct
DKWKHKFELKENRWQYVPSEEMLKFGKKIHQYIRHKWKYPLYMYHLRDGGHVAAAKLHIKNDYFSLIDISDFFGSTSQSRVTDELKKLIPYAKAREIAKLSTVRIPNANGLKHAIPYGYPQSPILATLMFHNSYCGGVINTINKSGHVTVSVYMDDIILSSDDLAQLNQAFDTVCEALRKSRYEVNENKTQSPSTMINVFNLELSHNSLRVSPERMVQFIQAYVKSDNEHERKGIASYVHSVNPDQARLHF

SEQ ID NO: 1641 - protein, 251 aa, synthetic construct
DKWKHKFELKENRWVAVPSEEMLKFGKKIHQYIRHKWKYPLYMYHLRDGGHVAAAKLHIKNDYFSLIDISDFFGSTSQSRVTDELKKLIPYAKAREIAKLSTVRIPNANGLKHAIPYGYPQSPILATLMFHNSYCGGVINTINKSGHVTVSVYMDDIILSSDDLAQLNQAFDTVCEALRKSRYEVNENKTQSPSTMINVFNLELSHNSLRVSPERMVQFIQAYVKSDNEHERKGIASYVHSVNPDQARLHF

SEQ ID NO: 1642 - protein, 251 aa, synthetic construct
DKWKHKFELKENRWVYVPSEEMLKFGKKIHQYIRHKWKYPLYMYHLRDGGHVAAAKLHIKNDYFSLIDISDFFGSTSQSRVTDELKKLIPYAKAREIAKLSTVRIPNANGLKHAIPYGYPQSPILATLMFHNSYCGGVINTINKSGHVTVSVYMDDIILSSDDLAQLNQAFDTVCEALRKSRYEVNENNTQSPSTMINVFNLELSHNSLRVSPERMVQFIQAYVKSDNEHERKGIASYVHSVNPDQARLHF

SEQ ID NO: 1643 - protein, 251 aa, synthetic construct
DKWKHKFELKENRWVYVPSEEMLKFGKKIHQYIRHKWKYPLYMYHLRDGGHVAAAKLHIKNDYFSLIDISDFFGSTSQSRVTDELKKLIPYAKAREIAKLSTVRIPNANGLKHAIPYGYPQSPILATLMFHNSYCGGVINTINKSGHVTVSVYMDDIILSSDDLAQLNQAFDTVCEALRKSRYEVNENKTQSPSTMINVWNLELSHNSLRVSPERMVQFIQAYVKSDNEHERKGIASYVHSVNPDQARLHF

SEQ ID NO: 1644 - protein, 251 aa, synthetic construct
DKWKHKFELKENRWVYVPSEEMLKFGKKIHQYIRHKWKYPLYMYHLRDGGHVAAAKLHIKNDYFSLIDISDFFGSTSQSRVTDELKKLIPYAKAREIAKLSTVRIPNANGLKHAIPYGYPQSPILATLMFHNSYCGGVINTINKSGHVTVSVYMDDIILSSDDLAQLNQAFDTVCEALRKSRYEVNENKTQSPSTMINVFNLELSHNSLRVSPERMVQFIQAYVKSDNEHERKGIASYVHSVNPDQARLHK

SEQ ID NO: 1645 - protein, 251 aa, synthetic construct
DKWKHKNELKENRWVQVPSEEMLKFGKKIHQYIRHKWKYPLYMYHLRDGGHVAAAKLHIKNDYFSLIDISDFFGSTSQSRVTDELKKLIPYAKAREIAKLSTVRIPNANGLKHAIPYGYPQSPILATLMFHNSYCGGVINTINKSGHVTVSVYMDDIILSSDDLAQLNQAFDTVCEALRKSRYEVNENKTQSPSTMINVFNLELSHNSLRVSPERMVQFIQAYVKSDNEHERKGIASYVHSVNPDQARLHF

SEQ ID NO: 1646 - protein, 251 aa, synthetic construct
DKWKHKNELKENRWVAVPSEEMLKFGKKIHQYIRHKWKYPLYMYHLRDGGHVAAAKLHIKNDYFSLIDISDFFGSTSQSRVTDELKKLIPYAKAREIAKLSTVRIPNANGLKHAIPYGYPQSPILATLMFHNSYCGGVINTINKSGHVTVSVYMDDIILSSDDLAQLNQAFDTVCEALRKSRYEVNENKTQSPSTMINVFNLELSHNSLRVSPERMVQFIQAYVKSDNEHERKGIASYVHSVNPDQARLHF

SEQ ID NO: 1647 - protein, 251 aa, synthetic construct
DKWKHKNELKENRWVYVPSEEMLKFGKKIHQYIRHKWKYPLYMYHLRDGGHVAAAKLHIKNDYFSLIDISDFFGSTSQSRVTDELKKLIPYAKAREIAKLSTVRIPNANGLKHAIPYGYPQSPILATLMFHNSYCGGVINTINKSGHVTVSVYMDDIILSSDDLAQLNQAFDTVCEALRKSRYEVNENNTQSPSTMINVFNLELSHNSLRVSPERMVQFIQAYVKSDNEHERKGIASYVHSVNPDQARLHF

SEQ ID NO: 1648 - protein, 251 aa, synthetic construct
DKWKHKNELKENRWVYVPSEEMLKFGKKIHQYIRHKWKYPLYMYHLRDGGHVAAAKLHIKNDYFSLIDISDFFGSTSQSRVTDELKKLIPYAKAREIAKLSTVRIPNANGLKHAIPYGYPQSPILATLMFHNSYCGGVINTINKSGHVTVSVYMDDIILSSDDLAQLNQAFDTVCEALRKSRYEVNENKTQSPSTMINVWNLELSHNSLRVSPERMVQFIQAYVKSDNEHERKGIASYVHSVNPDQARLHF

SEQ ID NO: 1649 - protein, 251 aa, synthetic construct
DKWKHKFELKENRWVYVPSEEYLKFGKKIHQYIRHKWKYPLYMYHLRDGGHIAAAKLHIKNDYFSLIDISDFFGSTSQSRVTDELKKLIPYAKAREIAKLSTVRIPNANGLKHAIPYGYPQSPILATLMAHNSYCGGVINTINKSGHVTVSVYMDDIILSSDDLGQLNQAFDTVCEALRKSRYEVNENKTQSPSTMINVFNLELSGNSLRVSPERMVQFIQAYVKSDNEHERKGIASYVHLVNPDQARLHF

SEQ ID NO: 1650 - protein, 251 aa, synthetic construct
DKWKHKNELKENRWVYVPSEEMLKFGKKIHQYIRHKWKYPLYMYHLRDGGHVAAAKLHIKNDYFSLIDISDFFGSTSQSRVTDELKKLIPYAKAREIAKLSTVRIPNANGLKHAIPYGYPQSPILATLMFHNSYCGGVINTINKSGHVTVSVYMDDIILSSDDLAQLNQAFDTVCEALRKSRYEVNENKTQSPSTMINVFNLELSHNSLRVSPERMVQFIQAYVKSDNEHERKGIASYVHSVNPDQARLHK

SEQ ID NO: 1651 - protein, 251 aa, synthetic construct
DKWKHKFELKENRWQAVPSEEMLKFGKKIHQYIRHKWKYPLYMYHLRDGGHVAAAKLHIKNDYFSLIDISDFFGSTSQSRVTDELKKLIPYAKAREIAKLSTVRIPNANGLKHAIPYGYPQSPILATLMFHNSYCGGVINTINKSGHVTVSVYMDDIILSSDDLAQLNQAFDTVCEALRKSRYEVNENKTQSPSTMINVFNLELSHNSLRVSPERMVQFIQAYVKSDNEHERKGIASYVHSVNPDQARLHF

SEQ ID NO: 1652 - protein, 251 aa, synthetic construct
DKWKHKFELKENRWQYVPSEEMLKFGKKIHQYIRHKWKYPLYMYHLRDGGHVAAAKLHIKNDYFSLIDISDFFGSTSQSRVTDELKKLIPYAKAREIAKLSTVRIPNANGLKHAIPYGYPQSPILATLMFHNSYCGGVINTINKSGHVTVSVYMDDIILSSDDLAQLNQAFDTVCEALRKSRYEVNENNTQSPSTMINVFNLELSHNSLRVSPERMVQFIQAYVKSDNEHERKGIASYVHSVNPDQARLHF

SEQ ID NO: 1653 - protein, 251 aa, synthetic construct
DKWKHKFELKENRWQYVPSEEMLKFGKKIHQYIRHKWKYPLYMYHLRDGGHVAAAKLHIKNDYFSLIDISDFFGSTSQSRVTDELKKLIPYAKAREIAKLSTVRIPNANGLKHAIPYGYPQSPILATLMFHNSYCGGVINTINKSGHVTVSVYMDDIILSSDDLAQLNQAFDTVCEALRKSRYEVNENKTQSPSTMINVWNLELSHNSLRVSPERMVQFIQAYVKSDNEHERKGIASYVHSVNPDQARLHF

SEQ ID NO: 1654 - protein, 251 aa, synthetic construct
DKWKHKFELKENRWQYVPSEEMLKFGKKIHQYIRHKWKYPLYMYHLRDGGHVAAAKLHIKNDYFSLIDISDFFGSTSQSRVTDELKKLIPYAKAREIAKLSTVRIPNANGLKHAIPYGYPQSPILATLMFHNSYCGGVINTINKSGHVTVSVYMDDIILSSDDLAQLNQAFDTVCEALRKSRYEVNENKTQSPSTMINVFNLELSHNSLRVSPERMVQFIQAYVKSDNEHERKGIASYVHSVNPDQARLHK

SEQ ID NO: 1655 - protein, 251 aa, synthetic construct
DKWKHKFELKENRWVAVPSEEMLKFGKKIHQYIRHKWKYPLYMYHLRDGGHVAAAKLHIKNDYFSLIDISDFFGSTSQSRVTDELKKLIPYAKAREIAKLSTVRIPNANGLKHAIPYGYPQSPILATLMFHNSYCGGVINTINKSGHVTVSVYMDDIILSSDDLAQLNQAFDTVCEALRKSRYEVNENNTQSPSTMINVFNLELSHNSLRVSPERMVQFIQAYVKSDNEHERKGIASYVHSVNPDQARLHF

SEQ ID NO: 1656 - protein, 251 aa, synthetic construct
DKWKHKFELKENRWVAVPSEEMLKFGKKIHQYIRHKWKYPLYMYHLRDGGHVAAAKLHIKNDYFSLIDISDFFGSTSQSRVTDELKKLIPYAKAREIAKLSTVRIPNANGLKHAIPYGYPQSPILATLMFHNSYCGGVINTINKSGHVTVSVYMDDIILSSDDLAQLNQAFDTVCEALRKSRYEVNENKTQSPSTMINVWNLELSHNSLRVSPERMVQFIQAYVKSDNEHERKGIASYVHSVNPDQARLHF

SEQ ID NO: 1657 - protein, 251 aa, synthetic construct
DKWKHKFELKENRWVAVPSEEMLKFGKKIHQYIRHKWKYPLYMYHLRDGGHVAAAKLHIKNDYFSLIDISDFFGSTSQSRVTDELKKLIPYAKAREIAKLSTVRIPNANGLKHAIPYGYPQSPILATLMFHNSYCGGVINTINKSGHVTVSVYMDDIILSSDDLAQLNQAFDTVCEALRKSRYEVNENKTQSPSTMINVFNLELSHNSLRVSPERMVQFIQAYVKSDNEHERKGIASYVHSVNPDQARLHK

SEQ ID NO: 1658 - protein, 251 aa, synthetic construct
DKWKHKFELKENRWVYVPSEEMLKFGKKIHQYIRHKWKYPLYMYHLRDGGHVAAAKLHIKNDYFSLIDISDFFGSTSQSRVTDELKKLIPYAKAREIAKLSTVRIPNANGLKHAIPYGYPQSPILATLMFHNSYCGGVINTINKSGHVTVSVYMDDIILSSDDLAQLNQAFDTVCEALRKSRYEVNENNTQSPSTMINVWNLELSHNSLRVSPERMVQFIQAYVKSDNEHERKGIASYVHSVNPDQARLHF

SEQ ID NO: 1659 - protein, 251 aa, synthetic construct
DKWKHKFELKENRWVYVPSEEMLKFGKKIHQYIRHKWKYPLYMYHLRDGGHVAAAKLHIKNDYFSLIDISDFFGSTSQSRVTDELKKLIPYAKAREIAKLSTVRIPNANGLKHAIPYGYPQSPILATLMFHNSYCGGVINTINKSGHVTVSVYMDDIILSSDDLAQLNQAFDTVCEALRKSRYEVNENNTQSPSTMINVFNLELSHNSLRVSPERMVQFIQAYVKSDNEHERKGIASYVHSVNPDQARLHK

SEQ ID NO: 1660 - protein, 251 aa, synthetic construct
DKWKHKFELKENRWVYVPSEEMLKFGKKIHQYIRHKWKQPLYMYHLRDGGHVAAAKMHIKNDYFSLIDISDFFGSTSQSRVTDELKKLIPYVKAREIAKLSTVRIPNANGLKHAIPYGYPQSPILATLMFHNSYCGGVINTINKSGHVTVSVYMDDIILSSDDLAQLNQAFDTVCEALRKSRYEVNENKTQSPSTMINVFNLELSGNSLRVSPERMVQFIQAYVKSDNEHERKGIASYVHSVNPDYARLHE

SEQ ID NO: 1661 - protein, 251 aa, synthetic construct
DKWKHKFELKENRWVYVPSEEMLKFGKKIHQYIRHKWKYPLYMYHLRDGGHVAAAKLHIKNDYFSLIDISDFFGSTSQSRVTDELKKLIPYAKAREIAKLSTVRIPNANGLKHAIPYGYPQSPILATLMFHNSYCGGVINTINKSGHVTVSVYMDDIILSSDDLAQLNQAFDTVCEALRKSRYEVNENKTQSPSTMINVWNLELSHNSLRVSPERMVQFIQAYVKSDNEHERKGIASYVHSVNPDQARLHK

SEQ ID NO: 1662 - protein, 251 aa, synthetic construct
DKWKHKFELKENRWVYVPSEEMLKFGKKIHQYIRHKWKYPLYMYHLRDGGHVAAAKLHIKNDYFSLIDISDFFGSTSQSRVTDELKKLIPYAKAREIAKLSTVRIPNANGLKHAIPYGYPQSPILATLMFHNSYCGGIINTINKSGHVTVSVYMDDIILSSSDLAQLNQAQDTVCEALRKSRYEVNENKTQSPSTMINVFNLELSGNSLRVSPERMVRFIQAYVKSDNEHERKGIASYVHSVNPDQARLHF

SEQ ID NO: 1663 - protein, 251 aa, synthetic construct
DKWKHKFELKENRWVYVPSEEMLKFGKKIHQYIRHKWKYPLYMYHLRDGGHVAAAKLHIKGDYFSLIDVSDFFGSTSQSRVTDELKKLIPYAKAREIAKLSTVRIPNANGLKHAIPYGYPQSPILATLMFHNSYCGGVINTINKSGHVTVSVYMDDIILSSDDLAQLNQAFDTVCEALRASRYEVNENKTQSPSTMITVFNLELSGNSLRVSPERMVQFIQAYVKSDNEHERKGIASYVHSVNPDQARLHF

SEQ ID NO: 1664 - protein, 1691 aa, synthetic construct
MKRTADGSEFESPKKKRKVDKKYSIGLDIGTNSVGWAVITDEYKVPSKKFKVLGNTDRHSIKKNLIGALLFDSGETAEATRLKRTARRRYTRRKNRICYLQEIFSNEMAKVDDSFFHRLEESFLVEEDKKHERHPIFGNIVDEVAYHEKYPTIYHLRKKLVDSTDKADLRLIYLALAHMIKFRGHFLIEGDLNPDNSDVDKLFIQLVQTYNQLFEENPINASGVDAKAILSARLSKSRRLENLIAQLPGEKKNGLFGNLIALSLGLTPNFKSNFDLAEDAKLQLSKDTYDDDLDNLLAQIGDQYADLFLAAKNLSDAILLSDILRVNTEITKAPLSASMIKRYDEHHQDLTLLKALVRQQLPEKYKEIFFDQSKNGYAGYIDGGASQEEFYKFIKPILEKMDGTEELLVKLNREDLLRKQRTFDNGSIPHQIHLGELHAILRRQEDFYPFLKDNREKIEKILTFRIPYYVGPLARGNSRFAWMTRKSEETITPWNFEEVVDKGASAQSFIERMTNFDKNLPNEKVLPKHSLLYEYFTVYNELTKVKYVTEGMRKPAFLSGEQKKAIVDLLFKTNRKVTVKQLKEDYFKKIECFDSVEISGVEDRFNASLGTYHDLLKIIKDKDFLDNEENEDILEDIVLTLTLFEDREMIEERLKTYAHLFDDKVMKQLKRRRYTGWGRLSRKLINGIRDKQSGKTILDFLKSDGFANRNFMQLIHDDSLTFKEDIQKAQVSGQGDSLHEHIANLAGSPAIKKGILQTVKVVDELVKVMGRHKPENIVIEMARENQTTQKGQKNSRERMKRIEEGIKELGSQILKEHPVENTQLQNEKLYLYYLQNGRDMYVDQELDINRLSDYDVDAIVPQSFLKDDSIDNKVLTRSDKNRGKSDNVPSEEVVKKMKNYWRQLLNAKLITQRKFDNLTKAERGGLSELDKAGFIKRQLVETRQITKHVAQILDSRMNTKYDENDKLIREVKVITLKSKLVSDFRKDFQFYKVREINNYHHAHDAYLNAVVGTALIKKYPKLESEFVYGDYKVYDVRKMIAKSEQEIGKATAKYFFYSNIMNFFKTEITLANGEIRKRPLIETNGETGEIVWDKGRDFATVRKVLSMPQVNIVKKTEVQTGGFSKESILPKRNSDKLIARKKDWDPKKYGGFDSPTVAYSVLVVAKVEKGKSKKLKSVKELLGITIMERSSFEKNPIDFLEAKGYKEVKKDLIIKLPKYSLFELENGRKRMLASAGELQKGNELALPSKYVNFLYLASHYEKLKGSPEDNEQKQLFVEQHKHYLDEIIEQISEFSKRVILADANLDKVLSAYNKHRDKPIREQAENIIHLFTLTNLGAPAAFKYFDTTIDRKRYTSTKEVLDATLIHQSITGLYETRIDLSQLGGDSGGSSGGSSGSETPGTSESATPESSGGSSGGSSDKWKHKFELKENRWVYVPSEEMLKFGKKIHQYIRHKWKYPLYMYHLRDGGHVAAAKLHIKNDYFSLIDISDFFGSTSQSRVTDELKKLIPYAKAREIAKLSTVRIPNANGLKHAIPYGYPQSPILATLMFHNSYCGGVINTINKSGHVTVSVYMDDIILSSDDLAQLNQAFDTVCEALRKSRYEVNENKTQSPSTMINVFNLELSGNSLRVSPERMVQFIQAYVKSDNEHERKGIASYVHSVNPGQARLHFSGGSKRTADGSEFEPKKKRKV

SEQ ID NO: 1665 - protein, 1691 aa, synthetic construct
MKRTADGSEFESPKKKRKVDKKYSIGLDIGTNSVGWAVITDEYKVPSKKFKVLGNTDRHSIKKNLIGALLFDSGETAEATRLKRTARRRYTRRKNRICYLQEIFSNEMAKVDDSFFHRLEESFLVEEDKKHERHPIFGNIVDEVAYHEKYPTIYHLRKKLVDSTDKADLRLIYLALAHMIKFRGHFLIEGDLNPDNSDVDKLFIQLVQTYNQLFEENPINASGVDAKAILSARLSKSRRLENLIAQLPGEKKNGLFGNLIALSLGLTPNFKSNFDLAEDAKLQLSKDTYDDDLDNLLAQIGDQYADLFLAAKNLSDAILLSDILRVNTEITKAPLSASMIKRYDEHHQDLTLLKALVRQQLPEKYKEIFFDQSKNGYAGYIDGGASQEEFYKFIKPILEKMDGTEELLVKLNREDLLRKQRTFDNGSIPHQIHLGELHAILRRQEDFYPFLKDNREKIEKILTFRIPYYVGPLARGNSRFAWMTRKSEETITPWNFEEVVDKGASAQSFIERMTNFDKNLPNEKVLPKHSLLYEYFTVYNELTKVKYVTEGMRKPAFLSGEQKKAIVDLLFKTNRKVTVKQLKEDYFKKIECFDSVEISGVEDRFNASLGTYHDLLKIIKDKDFLDNEENEDILEDIVLTLTLFEDREMIEERLKTYAHLFDDKVMKQLKRRRYTGWGRLSRKLINGIRDKQSGKTILDFLKSDGFANRNFMQLIHDDSLTFKEDIQKAQVSGQGDSLHEHIANLAGSPAIKKGILQTVKVVDELVKVMGRHKPENIVIEMARENQTTQKGQKNSRERMKRIEEGIKELGSQILKEHPVENTQLQNEKLYLYYLQNGRDMYVDQELDINRLSDYDVDAIVPQSFLKDDSIDNKVLTRSDKNRGKSDNVPSEEVVKKMKNYWRQLLNAKLITQRKFDNLTKAERGGLSELDKAGFIKRQLVETRQITKHVAQILDSRMNTKYDENDKLIREVKVITLKSKLVSDFRKDFQFYKVREINNYHHAHDAYLNAVVGTALIKKYPKLESEFVYGDYKVYDVRKMIAKSEQEIGKATAKYFFYSNIMNFFKTEITLANGEIRKRPLIETNGETGEIVWDKGRDFATVRKVLSMPQVNIVKKTEVQTGGFSKESILPKRNSDKLIARKKDWDPKKYGGFDSPTVAYSVLVVAKVEKGKSKKLKSVKELLGITIMERSSFEKNPIDFLEAKGYKEVKKDLIIKLPKYSLFELENGRKRMLASAGELQKGNELALPSKYVNFLYLASHYEKLKGSPEDNEQKQLFVEQHKHYLDEIIEQISEFSKRVILADANLDKVLSAYNKHRDKPIREQAENIIHLFTLTNLGAPAAFKYFDTTIDRKRYTSTKEVLDATLIHQSITGLYETRIDLSQLGGDSGGSSGGSSGSETPGTSESATPESSGGSSGGSSDKWKHKFELKENRWVYVPSEENLKFGKKIHQYVRHKWKYPLYMYHLRDGGHVAAAKLHIKNDYFSLIDISDFFGATSQSRVTDELKKLIPYAKAREIAKLSTVRIPNANGLKHAIPYGYPQSPILATLMFHNSYCGGVINTINKSGHVTVSVYMDDIILSSDDLAQLNQAFDTVCEALRKSRYEVNENKTSSPSTMTNVFNLELSGNSLRVSPERMVQFIQAYVKSDNEHERKGIASYVHSVNPDQARLHFSGGSKRTADGSEFEPKKKRKV

SEQ ID NO: 1666 - protein, 1691 aa, synthetic construct
MKRTADGSEFESPKKKRKVDKKYSIGLDIGTNSVGWAVITDEYKVPSKKFKVLGNTDRHSIKKNLIGALLFDSGETAEATRLKRTARRRYTRRKNRICYLQEIFSNEMAKVDDSFFHRLEESFLVEEDKKHERHPIFGNIVDEVAYHEKYPTIYHLRKKLVDSTDKADLRLIYLALAHMIKFRGHFLIEGDLNPDNSDVDKLFIQLVQTYNQLFEENPINASGVDAKAILSARLSKSRRLENLIAQLPGEKKNGLFGNLIALSLGLTPNFKSNFDLAEDAKLQLSKDTYDDDLDNLLAQIGDQYADLFLAAKNLSDAILLSDILRVNTEITKAPLSASMIKRYDEHHQDLTLLKALVRQQLPEKYKEIFFDQSKNGYAGYIDGGASQEEFYKFIKPILEKMDGTEELLVKLNREDLLRKQRTFDNGSIPHQIHLGELHAILRRQEDFYPFLKDNREKIEKILTFRIPYYVGPLARGNSRFAWMTRKSEETITPWNFEEVVDKGASAQSFIERMTNFDKNLPNEKVLPKHSLLYEYFTVYNELTKVKYVTEGMRKPAFLSGEQKKAIVDLLFKTNRKVTVKQLKEDYFKKIECFDSVEISGVEDRFNASLGTYHDLLKIIKDKDFLDNEENEDILEDIVLTLTLFEDREMIEERLKTYAHLFDDKVMKQLKRRRYTGWGRLSRKLINGIRDKQSGKTILDFLKSDGFANRNFMQLIHDDSLTFKEDIQKAQVSGQGDSLHEHIANLAGSPAIKKGILQTVKVVDELVKVMGRHKPENIVIEMARENQTTQKGQKNSRERMKRIEEGIKELGSQILKEHPVENTQLQNEKLYLYYLQNGRDMYVDQELDINRLSDYDVDAIVPQSFLKDDSIDNKVLTRSDKNRGKSDNVPSEEVVKKMKNYWRQLLNAKLITQRKFDNLTKAERGGLSELDKAGFIKRQLVETRQITKHVAQILDSRMNTKYDENDKLIREVKVITLKSKLVSDFRKDFQFYKVREINNYHHAHDAYLNAVVGTALIKKYPKLESEFVYGDYKVYDVRKMIAKSEQEIGKATAKYFFYSNIMNFFKTEITLANGEIRKRPLIETNGETGEIVWDKGRDFATVRKVLSMPQVNIVKKTEVQTGGFSKESILPKRNSDKLIARKKDWDPKKYGGFDSPTVAYSVLVVAKVEKGKSKKLKSVKELLGITIMERSSFEKNPIDFLEAKGYKEVKKDLIIKLPKYSLFELENGRKRMLASAGELQKGNELALPSKYVNFLYLASHYEKLKGSPEDNEQKQLFVEQHKHYLDEIIEQISEFSKRVILADANLDKVLSAYNKHRDKPIREQAENIIHLFTLTNLGAPAAFKYFDTTIDRKRYTSTKEVLDATLIHQSITGLYETRIDLSQLGGDSGGSSGGSSGSETPGTSESATPESSGGSSGGSSDKWKHKFELKENRWVYVPSEEMLKFGKKIHQYIRHKWKYPLYMYHLRDGGHVAAAKLNIKNDYFSLIDISDFFGSTSQSRVTDELKKLIPYAKAREIAKLSTVRIPNAPGLKHAIPYGYPQSPILATLMFHNSYCGGVINTINKSGHVTVSVYMDDIILSSDDLAQLNQAFDTVCEALRKSRYEVNENKTQSPSTMINVFNLELSGNSLRVSPERMIQFIQAYVKSDNEHERCGIASYVHSVNPDQARLHFSGGSKRTADGSEFEPKKKRKV

SEQ ID NO: 1667 - protein, 1691 aa, synthetic construct
MKRTADGSEFESPKKKRKVDKKYSIGLDIGTNSVGWAVITDEYKVPSKKFKVLGNTDRHSIKKNLIGALLFDSGETAEATRLKRTARRRYTRRKNRICYLQEIFSNEMAKVDDSFFHRLEESFLVEEDKKHERHPIFGNIVDEVAYHEKYPTIYHLRKKLVDSTDKADLRLIYLALAHMIKFRGHFLIEGDLNPDNSDVDKLFIQLVQTYNQLFEENPINASGVDAKAILSARLSKSRRLENLIAQLPGEKKNGLFGNLIALSLGLTPNFKSNFDLAEDAKLQLSKDTYDDDLDNLLAQIGDQYADLFLAAKNLSDAILLSDILRVNTEITKAPLSASMIKRYDEHHQDLTLLKALVRQQLPEKYKEIFFDQSKNGYAGYIDGGASQEEFYKFIKPILEKMDGTEELLVKLNREDLLRKQRTFDNGSIPHQIHLGELHAILRRQEDFYPFLKDNREKIEKILTFRIPYYVGPLARGNSRFAWMTRKSEETITPWNFEEVVDKGASAQSFIERMTNFDKNLPNEKVLPKHSLLYEYFTVYNELTKVKYVTEGMRKPAFLSGEQKKAIVDLLFKTNRKVTVKQLKEDYFKKIECFDSVEISGVEDRFNASLGTYHDLLKIIKDKDFLDNEENEDILEDIVLTLTLFEDREMIEERLKTYAHLFDDKVMKQLKRRRYTGWGRLSRKLINGIRDKQSGKTILDFLKSDGFANRNFMQLIHDDSLTFKEDIQKAQVSGQGDSLHEHIANLAGSPAIKKGILQTVKVVDELVKVMGRHKPENIVIEMARENQTTQKGQKNSRERMKRIEEGIKELGSQILKEHPVENTQLQNEKLYLYYLQNGRDMYVDQELDINRLSDYDVDAIVPQSFLKDDSIDNKVLTRSDKNRGKSDNVPSEEVVKKMKNYWRQLLNAKLITQRKFDNLTKAERGGLSELDKAGFIKRQLVETRQITKHVAQILDSRMNTKYDENDKLIREVKVITLKSKLVSDFRKDFQFYKVREINNYHHAHDAYLNAVVGTALIKKYPKLESEFVYGDYKVYDVRKMIAKSEQEIGKATAKYFFYSNIMNFFKTEITLANGEIRKRPLIETNGETGEIVWDKGRDFATVRKVLSMPQVNIVKKTEVQTGGFSKESILPKRNSDKLIARKKDWDPKKYGGFDSPTVAYSVLVVAKVEKGKSKKLKSVKELLGITIMERSSFEKNPIDFLEAKGYKEVKKDLIIKLPKYSLFELENGRKRMLASAGELQKGNELALPSKYVNFLYLASHYEKLKGSPEDNEQKQLFVEQHKHYLDEIIEQISEFSKRVILADANLDKVLSAYNKHRDKPIREQAENIIHLFTLTNLGAPAAFKYFDTTIDRKRYTSTKEVLDATLIHQSITGLYETRIDLSQLGGDSGGSSGGSSGSETPGTSESATPESSGGSSGGSSDKWKHKFELKENRWVYVPSEEMLKFGKKDHQYIRHKWKYPLYMYHLRDGGHVAAAKLHIKSDYFSLIDISDFFGSTSQSRVTDELKKLIPYAKAREIAKLSTVRIPNANGLKHAIPYGYPQSPILATLMFHNSYCGGVINTINKSGHVTVSVYMDDIILSSDDLAQLNQAFDTVCEALRKSRYEVNENKTQSPSTMINVFNLELSGNSLRVSAERMVQFIQAYVKSDNEHERKGIASYVHSVNPPQARLHFSGGSKRTADGSEFEPKKKRKV

SEQ ID NO: 1668 - protein, 1691 aa, synthetic construct
MKRTADGSEFESPKKKRKVDKKYSIGLDIGTNSVGWAVITDEYKVPSKKFKVLGNTDRHSIKKNLIGALLFDSGETAEATRLKRTARRRYTRRKNRICYLQEIFSNEMAKVDDSFFHRLEESFLVEEDKKHERHPIFGNIVDEVAYHEKYPTIYHLRKKLVDSTDKADLRLIYLALAHMIKFRGHFLIEGDLNPDNSDVDKLFIQLVQTYNQLFEENPINASGVDAKAILSARLSKSRRLENLIAQLPGEKKNGLFGNLIALSLGLTPNFKSNFDLAEDAKLQLSKDTYDDDLDNLLAQIGDQYADLFLAAKNLSDAILLSDILRVNTEITKAPLSASMIKRYDEHHQDLTLLKALVRQQLPEKYKEIFFDQSKNGYAGYIDGGASQEEFYKFIKPILEKMDGTEELLVKLNREDLLRKQRTFDNGSIPHQIHLGELHAILRRQEDFYPFLKDNREKIEKILTFRIPYYVGPLARGNSRFAWMTRKSEETITPWNFEEVVDKGASAQSFIERMTNFDKNLPNEKVLPKHSLLYEYFTVYNELTKVKYVTEGMRKPAFLSGEQKKAIVDLLFKTNRKVTVKQLKEDYFKKIECFDSVEISGVEDRFNASLGTYHDLLKIIKDKDFLDNEENEDILEDIVLTLTLFEDREMIEERLKTYAHLFDDKVMKQLKRRRYTGWGRLSRKLINGIRDKQSGKTILDFLKSDGFANRNFMQLIHDDSLTFKEDIQKAQVSGQGDSLHEHIANLAGSPAIKKGILQTVKVVDELVKVMGRHKPENIVIEMARENQTTQKGQKNSRERMKRIEEGIKELGSQILKEHPVENTQLQNEKLYLYYLQNGRDMYVDQELDINRLSDYDVDAIVPQSFLKDDSIDNKVLTRSDKNRGKSDNVPSEEVVKKMKNYWRQLLNAKLITQRKFDNLTKAERGGLSELDKAGFIKRQLVETRQITKHVAQILDSRMNTKYDENDKLIREVKVITLKSKLVSDFRKDFQFYKVREINNYHHAHDAYLNAVVGTALIKKYPKLESEFVYGDYKVYDVRKMIAKSEQEIGKATAKYFFYSNIMNFFKTEITLANGEIRKRPLIETNGETGEIVWDKGRDFATVRKVLSMPQVNIVKKTEVQTGGFSKESILPKRNSDKLIARKKDWDPKKYGGFDSPTVAYSVLVVAKVEKGKSKKLKSVKELLGITIMERSSFEKNPIDFLEAKGYKEVKKDLIIKLPKYSLFELENGRKRMLASAGELQKGNELALPSKYVNFLYLASHYEKLKGSPEDNEQKQLFVEQHKHYLDEIIEQISEFSKRVILADANLDKVLSAYNKHRDKPIREQAENIIHLFTLTNLGAPAAFKYFDTTIDRKRYTSTKEVLDATLIHQSITGLYETRIDLSQLGGDSGGSSGGSSGSETPGTSESATPESSGGSSGGSSDKWKHKFELKENRWVYVPSEEMLKFGKKIHQYIRHKWKYPLYMYHLRDGGHVAAAKLHIKNDYFSLIDISDFFGSTSQSRVTDELKKLIPYAKAREIAKLSTVRIPNANGLKHAIPYGYPQSPILATLMFHNSYCGGVINTINKSGHVTVSVYMDDIILSSDDLAQLNQWFDTVCEALRKSRYEVNENKTQSPSTMINVFNLELSGNSLRVSPERMVQFIQAYVKSDNEHERKGIASYVHSVNPDQARLPFSGGSKRTADGSEFEPKKKRKV

SEQ ID NO: 1669 - protein, 1691 aa, synthetic construct
MKRTADGSEFESPKKKRKVDKKYSIGLDIGTNSVGWAVITDEYKVPSKKFKVLGNTDRHSIKKNLIGALLFDSGETAEATRLKRTARRRYTRRKNRICYLQEIFSNEMAKVDDSFFHRLEESFLVEEDKKHERHPIFGNIVDEVAYHEKYPTIYHLRKKLVDSTDKADLRLIYLALAHMIKFRGHFLIEGDLNPDNSDVDKLFIQLVQTYNQLFEENPINASGVDAKAILSARLSKSRRLENLIAQLPGEKKNGLFGNLIALSLGLTPNFKSNFDLAEDAKLQLSKDTYDDDLDNLLAQIGDQYADLFLAAKNLSDAILLSDILRVNTEITKAPLSASMIKRYDEHHQDLTLLKALVRQQLPEKYKEIFFDQSKNGYAGYIDGGASQEEFYKFIKPILEKMDGTEELLVKLNREDLLRKQRTFDNGSIPHQIHLGELHAILRRQEDFYPFLKDNREKIEKILTFRIPYYVGPLARGNSRFAWMTRKSEETITPWNFEEVVDKGASAQSFIERMTNFDKNLPNEKVLPKHSLLYEYFTVYNELTKVKYVTEGMRKPAFLSGEQKKAIVDLLFKTNRKVTVKQLKEDYFKKIECFDSVEISGVEDRFNASLGTYHDLLKIIKDKDFLDNEENEDILEDIVLTLTLFEDREMIEERLKTYAHLFDDKVMKQLKRRRYTGWGRLSRKLINGIRDKQSGKTILDFLKSDGFANRNFMQLIHDDSLTFKEDIQKAQVSGQGDSLHEHIANLAGSPAIKKGILQTVKVVDELVKVMGRHKPENIVIEMARENQTTQKGQKNSRERMKRIEEGIKELGSQILKEHPVENTQLQNEKLYLYYLQNGRDMYVDQELDINRLSDYDVDAIVPQSFLKDDSIDNKVLTRSDKNRGKSDNVPSEEVVKKMKNYWRQLLNAKLITQRKFDNLTKAERGGLSELDKAGFIKRQLVETRQITKHVAQILDSRMNTKYDENDKLIREVKVITLKSKLVSDFRKDFQFYKVREINNYHHAHDAYLNAVVGTALIKKYPKLESEFVYGDYKVYDVRKMIAKSEQEIGKATAKYFFYSNIMNFFKTEITLANGEIRKRPLIETNGETGEIVWDKGRDFATVRKVLSMPQVNIVKKTEVQTGGFSKESILPKRNSDKLIARKKDWDPKKYGGFDSPTVAYSVLVVAKVEKGKSKKLKSVKELLGITIMERSSFEKNPIDFLEAKGYKEVKKDLIIKLPKYSLFELENGRKRMLASAGELQKGNELALPSKYVNFLYLASHYEKLKGSPEDNEQKQLFVEQHKHYLDEIIEQISEFSKRVILADANLDKVLSAYNKHRDKPIREQAENIIHLFTLTNLGAPAAFKYFDTTIDRKRYTSTKEVLDATLIHQSITGLYETRIDLSQLGGDSGGSSGGSSGSETPGTSESATPESSGGSSGGSSDKWKHKFELKENRWVTVPSEEMLKFGKKIHQYIRHKWKYPLYMYHLEDGGHVAAAKLHIKNDYFSLIDISDFYGSTSQSRVTDELKKLIPYAKAREVAKLSTVRIPNANGLKHAIPYGYPQSPILATLMFHNSYCGGVINTINKSGHVTVSVYMDDIILSSDDLAQLTQAFDTVCEALRKSRYEVNENKTQSPSTMINVFNLELSGNSLRVSPERMVQFIQAYVKSDNEHERSGIASYVHGVNPDQARLHFSGGSKRTADGSEFEPKKKRKV

SEQ ID NO: 1670 - protein, 1691 aa, synthetic construct
MKRTADGSEFESPKKKRKVDKKYSIGLDIGTNSVGWAVITDEYKVPSKKFKVLGNTDRHSIKKNLIGALLFDSGETAEATRLKRTARRRYTRRKNRICYLQEIFSNEMAKVDDSFFHRLEESFLVEEDKKHERHPIFGNIVDEVAYHEKYPTIYHLRKKLVDSTDKADLRLIYLALAHMIKFRGHFLIEGDLNPDNSDVDKLFIQLVQTYNQLFEENPINASGVDAKAILSARLSKSRRLENLIAQLPGEKKNGLFGNLIALSLGLTPNFKSNFDLAEDAKLQLSKDTYDDDLDNLLAQIGDQYADLFLAAKNLSDAILLSDILRVNTEITKAPLSASMIKRYDEHHQDLTLLKALVRQQLPEKYKEIFFDQSKNGYAGYIDGGASQEEFYKFIKPILEKMDGTEELLVKLNREDLLRKQRTFDNGSIPHQIHLGELHAILRRQEDFYPFLKDNREKIEKILTFRIPYYVGPLARGNSRFAWMTRKSEETITPWNFEEVVDKGASAQSFIERMTNFDKNLPNEKVLPKHSLLYEYFTVYNELTKVKYVTEGMRKPAFLSGEQKKAIVDLLFKTNRKVTVKQLKEDYFKKIECFDSVEISGVEDRFNASLGTYHDLLKIIKDKDFLDNEENEDILEDIVLTLTLFEDREMIEERLKTYAHLFDDKVMKQLKRRRYTGWGRLSRKLINGIRDKQSGKTILDFLKSDGFANRNFMQLIHDDSLTFKEDIQKAQVSGQGDSLHEHIANLAGSPAIKKGILQTVKVVDELVKVMGRHKPENIVIEMARENQTTQKGQKNSRERMKRIEEGIKELGSQILKEHPVENTQLQNEKLYLYYLQNGRDMYVDQELDINRLSDYDVDAIVPQSFLKDDSIDNKVLTRSDKNRGKSDNVPSEEVVKKMKNYWRQLLNAKLITQRKFDNLTKAERGGLSELDKAGFIKRQLVETRQITKHVAQILDSRMNTKYDENDKLIREVKVITLKSKLVSDFRKDFQFYKVREINNYHHAHDAYLNAVVGTALIKKYPKLESEFVYGDYKVYDVRKMIAKSEQEIGKATAKYFFYSNIMNFFKTEITLANGEIRKRPLIETNGETGEIVWDKGRDFATVRKVLSMPQVNIVKKTEVQTGGFSKESILPKRNSDKLIARKKDWDPKKYGGFDSPTVAYSVLVVAKVEKGKSKKLKSVKELLGITIMERSSFEKNPIDFLEAKGYKEVKKDLIIKLPKYSLFELENGRKRMLASAGELQKGNELALPSKYVNFLYLASHYEKLKGSPEDNEQKQLFVEQHKHYLDEIIEQISEFSKRVILADANLDKVLSAYNKHRDKPIREQAENIIHLFTLTNLGAPAAFKYFDTTIDRKRYTSTKEVLDATLIHQSITGLYETRIDLSQLGGDSGGSSGGSSGSETPGTSESATPESSGGSSGGSSDKWKHKFELKENKWVYVPSEEMLKFGKKIHQYIRHKWKYPLYMYHLRDGGHVAAAKLHIKNDYFSLIDISDFFGSTSQSRVTDELKKLIPYAKAREIAKLSTVWIPNANGLKHAIPYGYPQSPILATLMFHNSYCGGVINTINKSGHVTVSVYMDDIILSSDDLAQLNQAFDTVCEALIKSRYEVNENKTQSPSTMINVFNLELSGNSLRVSPERMVQFIQAYVKSDNEHERKGIASYVHSVNPDQARLHFSGGSKRTADGSEFEPKKKRKV

SEQ ID NO: 1671 - protein, 1691 aa, synthetic construct
MKRTADGSEFESPKKKRKVDKKYSIGLDIGTNSVGWAVITDEYKVPSKKFKVLGNTDRHSIKKNLIGALLFDSGETAEATRLKRTARRRYTRRKNRICYLQEIFSNEMAKVDDSFFHRLEESFLVEEDKKHERHPIFGNIVDEVAYHEKYPTIYHLRKKLVDSTDKADLRLIYLALAHMIKFRGHFLIEGDLNPDNSDVDKLFIQLVQTYNQLFEENPINASGVDAKAILSARLSKSRRLENLIAQLPGEKKNGLFGNLIALSLGLTPNFKSNFDLAEDAKLQLSKDTYDDDLDNLLAQIGDQYADLFLAAKNLSDAILLSDILRVNTEITKAPLSASMIKRYDEHHQDLTLLKALVRQQLPEKYKEIFFDQSKNGYAGYIDGGASQEEFYKFIKPILEKMDGTEELLVKLNREDLLRKQRTFDNGSIPHQIHLGELHAILRRQEDFYPFLKDNREKIEKILTFRIPYYVGPLARGNSRFAWMTRKSEETITPWNFEEVVDKGASAQSFIERMTNFDKNLPNEKVLPKHSLLYEYFTVYNELTKVKYVTEGMRKPAFLSGEQKKAIVDLLFKTNRKVTVKQLKEDYFKKIECFDSVEISGVEDRFNASLGTYHDLLKIIKDKDFLDNEENEDILEDIVLTLTLFEDREMIEERLKTYAHLFDDKVMKQLKRRRYTGWGRLSRKLINGIRDKQSGKTILDFLKSDGFANRNFMQLIHDDSLTFKEDIQKAQVSGQGDSLHEHIANLAGSPAIKKGILQTVKVVDELVKVMGRHKPENIVIEMARENQTTQKGQKNSRERMKRIEEGIKELGSQILKEHPVENTQLQNEKLYLYYLQNGRDMYVDQELDINRLSDYDVDAIVPQSFLKDDSIDNKVLTRSDKNRGKSDNVPSEEVVKKMKNYWRQLLNAKLITQRKFDNLTKAERGGLSELDKAGFIKRQLVETRQITKHVAQILDSRMNTKYDENDKLIREVKVITLKSKLVSDFRKDFQFYKVREINNYHHAHDAYLNAVVGTALIKKYPKLESEFVYGDYKVYDVRKMIAKSEQEIGKATAKYFFYSNIMNFFKTEITLANGEIRKRPLIETNGETGEIVWDKGRDFATVRKVLSMPQVNIVKKTEVQTGGFSKESILPKRNSDKLIARKKDWDPKKYGGFDSPTVAYSVLVVAKVEKGKSKKLKSVKELLGITIMERSSFEKNPIDFLEAKGYKEVKKDLIIKLPKYSLFELENGRKRMLASAGELQKGNELALPSKYVNFLYLASHYEKLKGSPEDNEQKQLFVEQHKHYLDEIIEQISEFSKRVILADANLDKVLSAYNKHRDKPIREQAENIIHLFTLTNLGAPAAFKYFDTTIDRKRYTSTKEVLDATLIHQSITGLYETRIDLSQLGGDSGGSSGGSSGSETPGTSESATPESSGGSSGGSSDKWKHKFELKENRWVTVPSEEMLKFGKKIHQYIRHKWKYPLYMYHLEDGGHVAAAKLHIKNDYFSLIDISDFYGSTSQSRVTDELKKLIPYAKAREIAKLSTVRIPNANGLKHAIPYGYPQSPILATLMFHNSYCGGVINTINKSGHVTVSVYMDDIILSSDDLAQLTQAFDTVCEALRKSRYEVNENKTQSPSGMINVFNLELSGNSLRVSPERMVQFIQAYVKSDNEHERSGIASYVHGVNPDQARLHFSGGSKRTADGSEFEPKKKRKV

SEQ ID NO: 1672 - protein, 1691 aa, synthetic construct
MKRTADGSEFESPKKKRKVDKKYSIGLDIGTNSVGWAVITDEYKVPSKKFKVLGNTDRHSIKKNLIGALLFDSGETAEATRLKRTARRRYTRRKNRICYLQEIFSNEMAKVDDSFFHRLEESFLVEEDKKHERHPIFGNIVDEVAYHEKYPTIYHLRKKLVDSTDKADLRLIYLALAHMIKFRGHFLIEGDLNPDNSDVDKLFIQLVQTYNQLFEENPINASGVDAKAILSARLSKSRRLENLIAQLPGEKKNGLFGNLIALSLGLTPNFKSNFDLAEDAKLQLSKDTYDDDLDNLLAQIGDQYADLFLAAKNLSDAILLSDILRVNTEITKAPLSASMIKRYDEHHQDLTLLKALVRQQLPEKYKEIFFDQSKNGYAGYIDGGASQEEFYKFIKPILEKMDGTEELLVKLNREDLLRKQRTFDNGSIPHQIHLGELHAILRRQEDFYPFLKDNREKIEKILTFRIPYYVGPLARGNSRFAWMTRKSEETITPWNFEEVVDKGASAQSFIERMTNFDKNLPNEKVLPKHSLLYEYFTVYNELTKVKYVTEGMRKPAFLSGEQKKAIVDLLFKTNRKVTVKQLKEDYFKKIECFDSVEISGVEDRFNASLGTYHDLLKIIKDKDFLDNEENEDILEDIVLTLTLFEDREMIEERLKTYAHLFDDKVMKQLKRRRYTGWGRLSRKLINGIRDKQSGKTILDFLKSDGFANRNFMQLIHDDSLTFKEDIQKAQVSGQGDSLHEHIANLAGSPAIKKGILQTVKVVDELVKVMGRHKPENIVIEMARENQTTQKGQKNSRERMKRIEEGIKELGSQILKEHPVENTQLQNEKLYLYYLQNGRDMYVDQELDINRLSDYDVDAIVPQSFLKDDSIDNKVLTRSDKNRGKSDNVPSEEVVKKMKNYWRQLLNAKLITQRKFDNLTKAERGGLSELDKAGFIKRQLVETRQITKHVAQILDSRMNTKYDENDKLIREVKVITLKSKLVSDFRKDFQFYKVREINNYHHAHDAYLNAVVGTALIKKYPKLESEFVYGDYKVYDVRKMIAKSEQEIGKATAKYFFYSNIMNFFKTEITLANGEIRKRPLIETNGETGEIVWDKGRDFATVRKVLSMPQVNIVKKTEVQTGGFSKESILPKRNSDKLIARKKDWDPKKYGGFDSPTVAYSVLVVAKVEKGKSKKLKSVKELLGITIMERSSFEKNPIDFLEAKGYKEVKKDLIIKLPKYSLFELENGRKRMLASAGELQKGNELALPSKYVNFLYLASHYEKLKGSPEDNEQKQLFVEQHKHYLDEIIEQISEFSKRVILADANLDKVLSAYNKHRDKPIREQAENIIHLFTLTNLGAPAAFKYFDTTIDRKRYTSTKEVLDATLIHQSITGLYETRIDLSQLGGDSGGSSGGSSGSETPGTSESATPESSGGSSGGSSDKWKHKFELKENRWVYVPSETMLKFGKKIHQYIRHKWKYPLYMYHLRDGGHVAAAKLHIKNDYFSLIDISDFFGSTSQSRVTDELKKLIPYAKAREIAKLSTVRIPNANGLKHAIPYGYPQSPILATLMFHNMYCGGVINTINKSGHVTVSVYMDDIILSSDDLAQLNQAFDTVCEALRKSRYEVNENKTQSPSTMINVFNLELSGNSLRVSPEEMVQFIQAYVKSDNEHERKGIASYVHSVNPDQARLHFSGGSKRTADGSEFEPKKKRKV

SEQ ID NO: 1673 - protein, 1691 aa, synthetic construct
MKRTADGSEFESPKKKRKVDKKYSIGLDIGTNSVGWAVITDEYKVPSKKFKVLGNTDRHSIKKNLIGALLFDSGETAEATRLKRTARRRYTRRKNRICYLQEIFSNEMAKVDDSFFHRLEESFLVEEDKKHERHPIFGNIVDEVAYHEKYPTIYHLRKKLVDSTDKADLRLIYLALAHMIKFRGHFLIEGDLNPDNSDVDKLFIQLVQTYNQLFEENPINASGVDAKAILSARLSKSRRLENLIAQLPGEKKNGLFGNLIALSLGLTPNFKSNFDLAEDAKLQLSKDTYDDDLDNLLAQIGDQYADLFLAAKNLSDAILLSDILRVNTEITKAPLSASMIKRYDEHHQDLTLLKALVRQQLPEKYKEIFFDQSKNGYAGYIDGGASQEEFYKFIKPILEKMDGTEELLVKLNREDLLRKQRTFDNGSIPHQIHLGELHAILRRQEDFYPFLKDNREKIEKILTFRIPYYVGPLARGNSRFAWMTRKSEETITPWNFEEVVDKGASAQSFIERMTNFDKNLPNEKVLPKHSLLYEYFTVYNELTKVKYVTEGMRKPAFLSGEQKKAIVDLLFKTNRKVTVKQLKEDYFKKIECFDSVEISGVEDRFNASLGTYHDLLKIIKDKDFLDNEENEDILEDIVLTLTLFEDREMIEERLKTYAHLFDDKVMKQLKRRRYTGWGRLSRKLINGIRDKQSGKTILDFLKSDGFANRNFMQLIHDDSLTFKEDIQKAQVSGQGDSLHEHIANLAGSPAIKKGILQTVKVVDELVKVMGRHKPENIVIEMARENQTTQKGQKNSRERMKRIEEGIKELGSQILKEHPVENTQLQNEKLYLYYLQNGRDMYVDQELDINRLSDYDVDAIVPQSFLKDDSIDNKVLTRSDKNRGKSDNVPSEEVVKKMKNYWRQLLNAKLITQRKFDNLTKAERGGLSELDKAGFIKRQLVETRQITKHVAQILDSRMNTKYDENDKLIREVKVITLKSKLVSDFRKDFQFYKVREINNYHHAHDAYLNAVVGTALIKKYPKLESEFVYGDYKVYDVRKMIAKSEQEIGKATAKYFFYSNIMNFFKTEITLANGEIRKRPLIETNGETGEIVWDKGRDFATVRKVLSMPQVNIVKKTEVQTGGFSKESILPKRNSDKLIARKKDWDPKKYGGFDSPTVAYSVLVVAKVEKGKSKKLKSVKELLGITIMERSSFEKNPIDFLEAKGYKEVKKDLIIKLPKYSLFELENGRKRMLASAGELQKGNELALPSKYVNFLYLASHYEKLKGSPEDNEQKQLFVEQHKHYLDEIIEQISEFSKRVILADANLDKVLSAYNKHRDKPIREQAENIIHLFTLTNLGAPAAFKYFDTTIDRKRYTSTKEVLDATLIHQSITGLYETRIDLSQLGGDSGGSSGGSSGSETPGTSESATPESSGGSSGGSSDKWKHKFELKENRWVYVPSEECLKFGKKIHQYIGHKWKYPLYMYHLRDGGHVAAAKLHIKNDYFSLIDISDFFGSTSQSRVTDELKKLIPYAKAREIAKLSTVRIPNANGLKHHIPYGYPQSPILATLMFHNSYCGGVINTINKSGHVTVSVYMDDIILSSDDLAQLNQAFDTVCEALRKSRYEVNENKTQSPSTMINVFNLELSGNSLRVSPSRMVQFIQAYVKSDNEHERKGIASYVHSVNPDQARLHMSGGSKRTADGSEFEPKKKRKV

SEQ ID NO: 1674 - protein, 1691 aa, synthetic construct
MKRTADGSEFESPKKKRKVDKKYSIGLDIGTNSVGWAVITDEYKVPSKKFKVLGNTDRHSIKKNLIGALLFDSGETAEATRLKRTARRRYTRRKNRICYLQEIFSNEMAKVDDSFFHRLEESFLVEEDKKHERHPIFGNIVDEVAYHEKYPTIYHLRKKLVDSTDKADLRLIYLALAHMIKFRGHFLIEGDLNPDNSDVDKLFIQLVQTYNQLFEENPINASGVDAKAILSARLSKSRRLENLIAQLPGEKKNGLFGNLIALSLGLTPNFKSNFDLAEDAKLQLSKDTYDDDLDNLLAQIGDQYADLFLAAKNLSDAILLSDILRVNTEITKAPLSASMIKRYDEHHQDLTLLKALVRQQLPEKYKEIFFDQSKNGYAGYIDGGASQEEFYKFIKPILEKMDGTEELLVKLNREDLLRKQRTFDNGSIPHQIHLGELHAILRRQEDFYPFLKDNREKIEKILTFRIPYYVGPLARGNSRFAWMTRKSEETITPWNFEEVVDKGASAQSFIERMTNFDKNLPNEKVLPKHSLLYEYFTVYNELTKVKYVTEGMRKPAFLSGEQKKAIVDLLFKTNRKVTVKQLKEDYFKKIECFDSVEISGVEDRFNASLGTYHDLLKIIKDKDFLDNEENEDILEDIVLTLTLFEDREMIEERLKTYAHLFDDKVMKQLKRRRYTGWGRLSRKLINGIRDKQSGKTILDFLKSDGFANRNFMQLIHDDSLTFKEDIQKAQVSGQGDSLHEHIANLAGSPAIKKGILQTVKVVDELVKVMGRHKPENIVIEMARENQTTQKGQKNSRERMKRIEEGIKELGSQILKEHPVENTQLQNEKLYLYYLQNGRDMYVDQELDINRLSDYDVDAIVPQSFLKDDSIDNKVLTRSDKNRGKSDNVPSEEVVKKMKNYWRQLLNAKLITQRKFDNLTKAERGGLSELDKAGFIKRQLVETRQITKHVAQILDSRMNTKYDENDKLIREVKVITLKSKLVSDFRKDFQFYKVREINNYHHAHDAYLNAVVGTALIKKYPKLESEFVYGDYKVYDVRKMIAKSEQEIGKATAKYFFYSNIMNFFKTEITLANGEIRKRPLIETNGETGEIVWDKGRDFATVRKVLSMPQVNIVKKTEVQTGGFSKESILPKRNSDKLIARKKDWDPKKYGGFDSPTVAYSVLVVAKVEKGKSKKLKSVKELLGITIMERSSFEKNPIDFLEAKGYKEVKKDLIIKLPKYSLFELENGRKRMLASAGELQKGNELALPSKYVNFLYLASHYEKLKGSPEDNEQKQLFVEQHKHYLDEIIEQISEFSKRVILADANLDKVLSAYNKHRDKPIREQAENIIHLFTLTNLGAPAAFKYFDTTIDRKRYTSTKEVLDATLIHQSITGLYETRIDLSQLGGDSGGSSGGSSGSETPGTSESATPESSGGSSGGSSDKWKHKFELKENRWVYVPSEEMLKFGKKIHQYIRHKWKYPLYMYHLRDGGHVAAAKLHIKNDYFSLIDISDFFGSTSQSRVTDELKKLIPYAKAREIAKLSTVRIPNANGLKHAIPYGLAQSPILATLMFHNSYCGGVINTINKSGHVTVSVYMDDIILSSDDLAQLNQAFDTVCEALRKSRYEVNENKTQSPSTMINVFNLELSGNSLRVSPERMVQFIQAYVKSDNEHERKGIASYVHSVNPDQARLHFSGGSKRTADGSEFEPKKKRKV

SEQ ID NO: 1675 - protein, 1691 aa, synthetic construct
MKRTADGSEFESPKKKRKVDKKYSIGLDIGTNSVGWAVITDEYKVPSKKFKVLGNTDRHSIKKNLIGALLFDSGETAEATRLKRTARRRYTRRKNRICYLQEIFSNEMAKVDDSFFHRLEESFLVEEDKKHERHPIFGNIVDEVAYHEKYPTIYHLRKKLVDSTDKADLRLIYLALAHMIKFRGHFLIEGDLNPDNSDVDKLFIQLVQTYNQLFEENPINASGVDAKAILSARLSKSRRLENLIAQLPGEKKNGLFGNLIALSLGLTPNFKSNFDLAEDAKLQLSKDTYDDDLDNLLAQIGDQYADLFLAAKNLSDAILLSDILRVNTEITKAPLSASMIKRYDEHHQDLTLLKALVRQQLPEKYKEIFFDQSKNGYAGYIDGGASQEEFYKFIKPILEKMDGTEELLVKLNREDLLRKQRTFDNGSIPHQIHLGELHAILRRQEDFYPFLKDNREKIEKILTFRIPYYVGPLARGNSRFAWMTRKSEETITPWNFEEVVDKGASAQSFIERMTNFDKNLPNEKVLPKHSLLYEYFTVYNELTKVKYVTEGMRKPAFLSGEQKKAIVDLLFKTNRKVTVKQLKEDYFKKIECFDSVEISGVEDRFNASLGTYHDLLKIIKDKDFLDNEENEDILEDIVLTLTLFEDREMIEERLKTYAHLFDDKVMKQLKRRRYTGWGRLSRKLINGIRDKQSGKTILDFLKSDGFANRNFMQLIHDDSLTFKEDIQKAQVSGQGDSLHEHIANLAGSPAIKKGILQTVKVVDELVKVMGRHKPENIVIEMARENQTTQKGQKNSRERMKRIEEGIKELGSQILKEHPVENTQLQNEKLYLYYLQNGRDMYVDQELDINRLSDYDVDAIVPQSFLKDDSIDNKVLTRSDKNRGKSDNVPSEEVVKKMKNYWRQLLNAKLITQRKFDNLTKAERGGLSELDKAGFIKRQLVETRQITKHVAQILDSRMNTKYDENDKLIREVKVITLKSKLVSDFRKDFQFYKVREINNYHHAHDAYLNAVVGTALIKKYPKLESEFVYGDYKVYDVRKMIAKSEQEIGKATAKYFFYSNIMNFFKTEITLANGEIRKRPLIETNGETGEIVWDKGRDFATVRKVLSMPQVNIVKKTEVQTGGFSKESILPKRNSDKLIARKKDWDPKKYGGFDSPTVAYSVLVVAKVEKGKSKKLKSVKELLGITIMERSSFEKNPIDFLEAKGYKEVKKDLIIKLPKYSLFELENGRKRMLASAGELQKGNELALPSKYVNFLYLASHYEKLKGSPEDNEQKQLFVEQHKHYLDEIIEQISEFSKRVILADANLDKVLSAYNKHRDKPIREQAENIIHLFTLTNLGAPAAFKYFDTTIDRKRYTSTKEVLDATLIHQSITGLYETRIDLSQLGGDSGGSSGGSSGSETPGTSESATPESSGGSSGGSSDKWKHKFELKENRWVYVPSEEMLKFGKKIHQYIRHKWKYPLYMYHLRDGGHVAAAKLHIKNDYFSLIDISDFFGSTSQSRVTDELKKLIPYAKAREIAKLSTVRIPNANGLKHAIPYGYPQSPILATLMFHNSYCGGVINTINKSGHVTVSVYMDDIILSSDDLAQLNQAFDTVCEALRKSRYEVNENKTQSPSTMINVFWLELSGNSLRVSPERMVQFIQAYVKSDNEHEAKGIAQYVHSVNPDQARLHFSGGSKRTADGSEFEPKKKRKV

SEQ ID NO: 1676 - protein, 1691 aa, synthetic construct
MKRTADGSEFESPKKKRKVDKKYSIGLDIGTNSVGWAVITDEYKVPSKKFKVLGNTDRHSIKKNLIGALLFDSGETAEATRLKRTARRRYTRRKNRICYLQEIFSNEMAKVDDSFFHRLEESFLVEEDKKHERHPIFGNIVDEVAYHEKYPTIYHLRKKLVDSTDKADLRLIYLALAHMIKFRGHFLIEGDLNPDNSDVDKLFIQLVQTYNQLFEENPINASGVDAKAILSARLSKSRRLENLIAQLPGEKKNGLFGNLIALSLGLTPNFKSNFDLAEDAKLQLSKDTYDDDLDNLLAQIGDQYADLFLAAKNLSDAILLSDILRVNTEITKAPLSASMIKRYDEHHQDLTLLKALVRQQLPEKYKEIFFDQSKNGYAGYIDGGASQEEFYKFIKPILEKMDGTEELLVKLNREDLLRKQRTFDNGSIPHQIHLGELHAILRRQEDFYPFLKDNREKIEKILTFRIPYYVGPLARGNSRFAWMTRKSEETITPWNFEEVVDKGASAQSFIERMTNFDKNLPNEKVLPKHSLLYEYFTVYNELTKVKYVTEGMRKPAFLSGEQKKAIVDLLFKTNRKVTVKQLKEDYFKKIECFDSVEISGVEDRFNASLGTYHDLLKIIKDKDFLDNEENEDILEDIVLTLTLFEDREMIEERLKTYAHLFDDKVMKQLKRRRYTGWGRLSRKLINGIRDKQSGKTILDFLKSDGFANRNFMQLIHDDSLTFKEDIQKAQVSGQGDSLHEHIANLAGSPAIKKGILQTVKVVDELVKVMGRHKPENIVIEMARENQTTQKGQKNSRERMKRIEEGIKELGSQILKEHPVENTQLQNEKLYLYYLQNGRDMYVDQELDINRLSDYDVDAIVPQSFLKDDSIDNKVLTRSDKNRGKSDNVPSEEVVKKMKNYWRQLLNAKLITQRKFDNLTKAERGGLSELDKAGFIKRQLVETRQITKHVAQILDSRMNTKYDENDKLIREVKVITLKSKLVSDFRKDFQFYKVREINNYHHAHDAYLNAVVGTALIKKYPKLESEFVYGDYKVYDVRKMIAKSEQEIGKATAKYFFYSNIMNFFKTEITLANGEIRKRPLIETNGETGEIVWDKGRDFATVRKVLSMPQVNIVKKTEVQTGGFSKESILPKRNSDKLIARKKDWDPKKYGGFDSPTVAYSVLVVAKVEKGKSKKLKSVKELLGITIMERSSFEKNPIDFLEAKGYKEVKKDLIIKLPKYSLFELENGRKRMLASAGELQKGNELALPSKYVNFLYLASHYEKLKGSPEDNEQKQLFVEQHKHYLDEIIEQISEFSKRVILADANLDKVLSAYNKHRDKPIREQAENIIHLFTLTNLGAPAAFKYFDTTIDRKRYTSTKEVLDATLIHQSITGLYETRIDLSQLGGDSGGSSGGSSGSETPGTSESATPESSGGSSGGSSDKWKHKFELKENRWVYVPSEEMLKFGKKIHQYIRHKWKYPLYMYHLRDGGHVAAAKLHIKNDYFSLIDISDFFGSRSQSRVTRELKKLIPYAKAREIAKLSTVRIPNANGLKHAIPYGYPQSPILATLCFHNSYCGGVINTINKSGHVTVSVYMDDIILSSDDLAQLNQAFDTVCEALRKSRYEVNENKTQSPSTMINVFNLELSGNSLRVSPERMVQFIQAYVKSDNEHERKGIASYVHSVNPDQARLHFSGGSKRTADGSEFEPKKKRKV

SEQ ID NO: 1677 - protein, 1691 aa, synthetic construct
MKRTADGSEFESPKKKRKVDKKYSIGLDIGTNSVGWAVITDEYKVPSKKFKVLGNTDRHSIKKNLIGALLFDSGETAEATRLKRTARRRYTRRKNRICYLQEIFSNEMAKVDDSFFHRLEESFLVEEDKKHERHPIFGNIVDEVAYHEKYPTIYHLRKKLVDSTDKADLRLIYLALAHMIKFRGHFLIEGDLNPDNSDVDKLFIQLVQTYNQLFEENPINASGVDAKAILSARLSKSRRLENLIAQLPGEKKNGLFGNLIALSLGLTPNFKSNFDLAEDAKLQLSKDTYDDDLDNLLAQIGDQYADLFLAAKNLSDAILLSDILRVNTEITKAPLSASMIKRYDEHHQDLTLLKALVRQQLPEKYKEIFFDQSKNGYAGYIDGGASQEEFYKFIKPILEKMDGTEELLVKLNREDLLRKQRTFDNGSIPHQIHLGELHAILRRQEDFYPFLKDNREKIEKILTFRIPYYVGPLARGNSRFAWMTRKSEETITPWNFEEVVDKGASAQSFIERMTNFDKNLPNEKVLPKHSLLYEYFTVYNELTKVKYVTEGMRKPAFLSGEQKKAIVDLLFKTNRKVTVKQLKEDYFKKIECFDSVEISGVEDRFNASLGTYHDLLKIIKDKDFLDNEENEDILEDIVLTLTLFEDREMIEERLKTYAHLFDDKVMKQLKRRRYTGWGRLSRKLINGIRDKQSGKTILDFLKSDGFANRNFMQLIHDDSLTFKEDIQKAQVSGQGDSLHEHIANLAGSPAIKKGILQTVKVVDELVKVMGRHKPENIVIEMARENQTTQKGQKNSRERMKRIEEGIKELGSQILKEHPVENTQLQNEKLYLYYLQNGRDMYVDQELDINRLSDYDVDAIVPQSFLKDDSIDNKVLTRSDKNRGKSDNVPSEEVVKKMKNYWRQLLNAKLITQRKFDNLTKAERGGLSELDKAGFIKRQLVETRQITKHVAQILDSRMNTKYDENDKLIREVKVITLKSKLVSDFRKDFQFYKVREINNYHHAHDAYLNAVVGTALIKKYPKLESEFVYGDYKVYDVRKMIAKSEQEIGKATAKYFFYSNIMNFFKTEITLANGEIRKRPLIETNGETGEIVWDKGRDFATVRKVLSMPQVNIVKKTEVQTGGFSKESILPKRNSDKLIARKKDWDPKKYGGFDSPTVAYSVLVVAKVEKGKSKKLKSVKELLGITIMERSSFEKNPIDFLEAKGYKEVKKDLIIKLPKYSLFELENGRKRMLASAGELQKGNELALPSKYVNFLYLASHYEKLKGSPEDNEQKQLFVEQHKHYLDEIIEQISEFSKRVILADANLDKVLSAYNKHRDKPIREQAENIIHLFTLTNLGAPAAFKYFDTTIDRKRYTSTKEVLDATLIHQSITGLYETRIDLSQLGGDSGGSSGGSSGSETPGTSESATPESSGGSSGGSSDKWKHKFELKENRWVYVPSEEMLKFGKKIHQYIRHKWKYPLYMYHLRDGGHVAAAKLHIKNDYFSLIDISDLFGSTSQSRVTDELKKLIPYAKAREIAKLSTVRIPNANGLKHAIPYGYPQSPILATLMFHNSYCGGVINTINKSGHVTVSVYMDDIILSSCDLAQLNQAFDTVCEALRKSRYEVNENKTQSPSTMINVFNLELSGNSLRVSPERMVQFIQAYVKSDNEHERKGIASYVHSVTPDPARLHFSGGSKRTADGSEFEPKKKRKV

SEQ ID NO: 1678 - protein, 1691 aa, synthetic construct
MKRTADGSEFESPKKKRKVDKKYSIGLDIGTNSVGWAVITDEYKVPSKKFKVLGNTDRHSIKKNLIGALLFDSGETAEATRLKRTARRRYTRRKNRICYLQEIFSNEMAKVDDSFFHRLEESFLVEEDKKHERHPIFGNIVDEVAYHEKYPTIYHLRKKLVDSTDKADLRLIYLALAHMIKFRGHFLIEGDLNPDNSDVDKLFIQLVQTYNQLFEENPINASGVDAKAILSARLSKSRRLENLIAQLPGEKKNGLFGNLIALSLGLTPNFKSNFDLAEDAKLQLSKDTYDDDLDNLLAQIGDQYADLFLAAKNLSDAILLSDILRVNTEITKAPLSASMIKRYDEHHQDLTLLKALVRQQLPEKYKEIFFDQSKNGYAGYIDGGASQEEFYKFIKPILEKMDGTEELLVKLNREDLLRKQRTFDNGSIPHQIHLGELHAILRRQEDFYPFLKDNREKIEKILTFRIPYYVGPLARGNSRFAWMTRKSEETITPWNFEEVVDKGASAQSFIERMTNFDKNLPNEKVLPKHSLLYEYFTVYNELTKVKYVTEGMRKPAFLSGEQKKAIVDLLFKTNRKVTVKQLKEDYFKKIECFDSVEISGVEDRFNASLGTYHDLLKIIKDKDFLDNEENEDILEDIVLTLTLFEDREMIEERLKTYAHLFDDKVMKQLKRRRYTGWGRLSRKLINGIRDKQSGKTILDFLKSDGFANRNFMQLIHDDSLTFKEDIQKAQVSGQGDSLHEHIANLAGSPAIKKGILQTVKVVDELVKVMGRHKPENIVIEMARENQTTQKGQKNSRERMKRIEEGIKELGSQILKEHPVENTQLQNEKLYLYYLQNGRDMYVDQELDINRLSDYDVDAIVPQSFLKDDSIDNKVLTRSDKNRGKSDNVPSEEVVKKMKNYWRQLLNAKLITQRKFDNLTKAERGGLSELDKAGFIKRQLVETRQITKHVAQILDSRMNTKYDENDKLIREVKVITLKSKLVSDFRKDFQFYKVREINNYHHAHDAYLNAVVGTALIKKYPKLESEFVYGDYKVYDVRKMIAKSEQEIGKATAKYFFYSNIMNFFKTEITLANGEIRKRPLIETNGETGEIVWDKGRDFATVRKVLSMPQVNIVKKTEVQTGGFSKESILPKRNSDKLIARKKDWDPKKYGGFDSPTVAYSVLVVAKVEKGKSKKLKSVKELLGITIMERSSFEKNPIDFLEAKGYKEVKKDLIIKLPKYSLFELENGRKRMLASAGELQKGNELALPSKYVNFLYLASHYEKLKGSPEDNEQKQLFVEQHKHYLDEIIEQISEFSKRVILADANLDKVLSAYNKHRDKPIREQAENIIHLFTLTNLGAPAAFKYFDTTIDRKRYTSTKEVLDATLIHQSITGLYETRIDLSQLGGDSGGSSGGSSGSETPGTSESATPESSGGSSGGSSDKWKHKFELKENRRVYVPSEEMLKFGKKIHQYIRHKWKYPLYMVHLRDGGHVAAAKLHIKNDYFSLIDISDFFGSTSQSRVTDELKKLIPYAKVREIAKLSTVRIPNANGLKHAIPYGYPQSPILATLMFHNSYCGGVINTINKSGHVTVSVYMDDIILSSDDLAQLNQAFDTVCEALRKSRYEVNENKTQSPSTMINVFNLELSGNSLRVSPERMVQFIQAYVKSDNEHERKGIASYVHSVNPDQARLHFSGGSKRTADGSEFEPKKKRKV

SEQ ID NO: 1679 - protein, 1691 aa, synthetic construct
MKRTADGSEFESPKKKRKVDKKYSIGLDIGTNSVGWAVITDEYKVPSKKFKVLGNTDRHSIKKNLIGALLFDSGETAEATRLKRTARRRYTRRKNRICYLQEIFSNEMAKVDDSFFHRLEESFLVEEDKKHERHPIFGNIVDEVAYHEKYPTIYHLRKKLVDSTDKADLRLIYLALAHMIKFRGHFLIEGDLNPDNSDVDKLFIQLVQTYNQLFEENPINASGVDAKAILSARLSKSRRLENLIAQLPGEKKNGLFGNLIALSLGLTPNFKSNFDLAEDAKLQLSKDTYDDDLDNLLAQIGDQYADLFLAAKNLSDAILLSDILRVNTEITKAPLSASMIKRYDEHHQDLTLLKALVRQQLPEKYKEIFFDQSKNGYAGYIDGGASQEEFYKFIKPILEKMDGTEELLVKLNREDLLRKQRTFDNGSIPHQIHLGELHAILRRQEDFYPFLKDNREKIEKILTFRIPYYVGPLARGNSRFAWMTRKSEETITPWNFEEVVDKGASAQSFIERMTNFDKNLPNEKVLPKHSLLYEYFTVYNELTKVKYVTEGMRKPAFLSGEQKKAIVDLLFKTNRKVTVKQLKEDYFKKIECFDSVEISGVEDRFNASLGTYHDLLKIIKDKDFLDNEENEDILEDIVLTLTLFEDREMIEERLKTYAHLFDDKVMKQLKRRRYTGWGRLSRKLINGIRDKQSGKTILDFLKSDGFANRNFMQLIHDDSLTFKEDIQKAQVSGQGDSLHEHIANLAGSPAIKKGILQTVKVVDELVKVMGRHKPENIVIEMARENQTTQKGQKNSRERMKRIEEGIKELGSQILKEHPVENTQLQNEKLYLYYLQNGRDMYVDQELDINRLSDYDVDAIVPQSFLKDDSIDNKVLTRSDKNRGKSDNVPSEEVVKKMKNYWRQLLNAKLITQRKFDNLTKAERGGLSELDKAGFIKRQLVETRQITKHVAQILDSRMNTKYDENDKLIREVKVITLKSKLVSDFRKDFQFYKVREINNYHHAHDAYLNAVVGTALIKKYPKLESEFVYGDYKVYDVRKMIAKSEQEIGKATAKYFFYSNIMNFFKTEITLANGEIRKRPLIETNGETGEIVWDKGRDFATVRKVLSMPQVNIVKKTEVQTGGFSKESILPKRNSDKLIARKKDWDPKKYGGFDSPTVAYSVLVVAKVEKGKSKKLKSVKELLGITIMERSSFEKNPIDFLEAKGYKEVKKDLIIKLPKYSLFELENGRKRMLASAGELQKGNELALPSKYVNFLYLASHYEKLKGSPEDNEQKQLFVEQHKHYLDEIIEQISEFSKRVILADANLDKVLSAYNKHRDKPIREQAENIIHLFTLTNLGAPAAFKYFDTTIDRKRYTSTKEVLDATLIHQSITGLYETRIDLSQLGGDSGGSSGGSSGSETPGTSESATPESSGGSSGGSSDKWKHKFELKENRWVTVPSEEMLKFGKKIHQYIRHKWKYPLYMYHLEDGGHVAAAKLHIKNDYFSLIDISDFYGSTSQSRVTDELKKLIPYAKAREVAKLSTVRIPNANGLKHAIPYGYPQSPILATLMFHNSYCGGVINTINKSGHVTVSVYMDDIILSSDDLAQLTQAFDTVCEALRKSRYEVNENKTQSPSGMINVFNLELSGNSLRVSPERMVQFIQAYVKSDNEHERKGIASYVHGVNPDQARLHFSGGSKRTADGSEFEPKKKRKV

SEQ ID NO: 1680 - protein, 1691 aa, synthetic construct
MKRTADGSEFESPKKKRKVDKKYSIGLDIGTNSVGWAVITDEYKVPSKKFKVLGNTDRHSIKKNLIGALLFDSGETAEATRLKRTARRRYTRRKNRICYLQEIFSNEMAKVDDSFFHRLEESFLVEEDKKHERHPIFGNIVDEVAYHEKYPTIYHLRKKLVDSTDKADLRLIYLALAHMIKFRGHFLIEGDLNPDNSDVDKLFIQLVQTYNQLFEENPINASGVDAKAILSARLSKSRRLENLIAQLPGEKKNGLFGNLIALSLGLTPNFKSNFDLAEDAKLQLSKDTYDDDLDNLLAQIGDQYADLFLAAKNLSDAILLSDILRVNTEITKAPLSASMIKRYDEHHQDLTLLKALVRQQLPEKYKEIFFDQSKNGYAGYIDGGASQEEFYKFIKPILEKMDGTEELLVKLNREDLLRKQRTFDNGSIPHQIHLGELHAILRRQEDFYPFLKDNREKIEKILTFRIPYYVGPLARGNSRFAWMTRKSEETITPWNFEEVVDKGASAQSFIERMTNFDKNLPNEKVLPKHSLLYEYFTVYNELTKVKYVTEGMRKPAFLSGEQKKAIVDLLFKTNRKVTVKQLKEDYFKKIECFDSVEISGVEDRFNASLGTYHDLLKIIKDKDFLDNEENEDILEDIVLTLTLFEDREMIEERLKTYAHLFDDKVMKQLKRRRYTGWGRLSRKLINGIRDKQSGKTILDFLKSDGFANRNFMQLIHDDSLTFKEDIQKAQVSGQGDSLHEHIANLAGSPAIKKGILQTVKVVDELVKVMGRHKPENIVIEMARENQTTQKGQKNSRERMKRIEEGIKELGSQILKEHPVENTQLQNEKLYLYYLQNGRDMYVDQELDINRLSDYDVDAIVPQSFLKDDSIDNKVLTRSDKNRGKSDNVPSEEVVKKMKNYWRQLLNAKLITQRKFDNLTKAERGGLSELDKAGFIKRQLVETRQITKHVAQILDSRMNTKYDENDKLIREVKVITLKSKLVSDFRKDFQFYKVREINNYHHAHDAYLNAVVGTALIKKYPKLESEFVYGDYKVYDVRKMIAKSEQEIGKATAKYFFYSNIMNFFKTEITLANGEIRKRPLIETNGETGEIVWDKGRDFATVRKVLSMPQVNIVKKTEVQTGGFSKESILPKRNSDKLIARKKDWDPKKYGGFDSPTVAYSVLVVAKVEKGKSKKLKSVKELLGITIMERSSFEKNPIDFLEAKGYKEVKKDLIIKLPKYSLFELENGRKRMLASAGELQKGNELALPSKYVNFLYLASHYEKLKGSPEDNEQKQLFVEQHKHYLDEIIEQISEFSKRVILADANLDKVLSAYNKHRDKPIREQAENIIHLFTLTNLGAPAAFKYFDTTIDRKRYTSTKEVLDATLIHQSITGLYETRIDLSQLGGDSGGSSGGSSGSETPGTSESATPESSGGSSGGSSDKWKHKFELKENRWVTVPSEEMLKFGKKIHQYIRHKWKYPLYMYHLEDGGHVAAAKLHIKNDYFSLIDISDFFGSTSQSRVTDELKKLIPYAKAREIAKLSTVRIPNANGLKHAIPYGYPQSPILATLMFHNSYCGGVINTINKSGHVTVSVYMDDIILSSDDLAQLTQAFDTVCEALRKSRYEVNENKTQSPSGMINVFNLELSGNSLRVSPERMVQFIQAYVKSDNEHEWSGIASYVHGVNPDQARLHFSGGSKRTADGSEFEPKKKRKV

SEQ ID NO: 1681 - protein, 1691 aa, synthetic construct
MKRTADGSEFESPKKKRKVDKKYSIGLDIGTNSVGWAVITDEYKVPSKKFKVLGNTDRHSIKKNLIGALLFDSGETAEATRLKRTARRRYTRRKNRICYLQEIFSNEMAKVDDSFFHRLEESFLVEEDKKHERHPIFGNIVDEVAYHEKYPTIYHLRKKLVDSTDKADLRLIYLALAHMIKFRGHFLIEGDLNPDNSDVDKLFIQLVQTYNQLFEENPINASGVDAKAILSARLSKSRRLENLIAQLPGEKKNGLFGNLIALSLGLTPNFKSNFDLAEDAKLQLSKDTYDDDLDNLLAQIGDQYADLFLAAKNLSDAILLSDILRVNTEITKAPLSASMIKRYDEHHQDLTLLKALVRQQLPEKYKEIFFDQSKNGYAGYIDGGASQEEFYKFIKPILEKMDGTEELLVKLNREDLLRKQRTFDNGSIPHQIHLGELHAILRRQEDFYPFLKDNREKIEKILTFRIPYYVGPLARGNSRFAWMTRKSEETITPWNFEEVVDKGASAQSFIERMTNFDKNLPNEKVLPKHSLLYEYFTVYNELTKVKYVTEGMRKPAFLSGEQKKAIVDLLFKTNRKVTVKQLKEDYFKKIECFDSVEISGVEDRFNASLGTYHDLLKIIKDKDFLDNEENEDILEDIVLTLTLFEDREMIEERLKTYAHLFDDKVMKQLKRRRYTGWGRLSRKLINGIRDKQSGKTILDFLKSDGFANRNFMQLIHDDSLTFKEDIQKAQVSGQGDSLHEHIANLAGSPAIKKGILQTVKVVDELVKVMGRHKPENIVIEMARENQTTQKGQKNSRERMKRIEEGIKELGSQILKEHPVENTQLQNEKLYLYYLQNGRDMYVDQELDINRLSDYDVDAIVPQSFLKDDSIDNKVLTRSDKNRGKSDNVPSEEVVKKMKNYWRQLLNAKLITQRKFDNLTKAERGGLSELDKAGFIKRQLVETRQITKHVAQILDSRMNTKYDENDKLIREVKVITLKSKLVSDFRKDFQFYKVREINNYHHAHDAYLNAVVGTALIKKYPKLESEFVYGDYKVYDVRKMIAKSEQEIGKATAKYFFYSNIMNFFKTEITLANGEIRKRPLIETNGETGEIVWDKGRDFATVRKVLSMPQVNIVKKTEVQTGGFSKESILPKRNSDKLIARKKDWDPKKYGGFDSPTVAYSVLVVAKVEKGKSKKLKSVKELLGITIMERSSFEKNPIDFLEAKGYKEVKKDLIIKLPKYSLFELENGRKRMLASAGELQKGNELALPSKYVNFLYLASHYEKLKGSPEDNEQKQLFVEQHKHYLDEIIEQISEFSKRVILADANLDKVLSAYNKHRDKPIREQAENIIHLFTLTNLGAPAAFKYFDTTIDRKRYTSTKEVLDATLIHQSITGLYETRIDLSQLGGDSGGSSGGSSGSETPGTSESATPESSGGSSGGSSDKWKHKFELKENRWVYVPSEEMLKFGKKIHQYIRHKWKYPLYMYHLRDGGHVAAAKLHIKNDYFSLVDISDIFGSTSQTRVTDELKKLIPYAKAREIAKLSTVRIPNANGLKHAIPYGYPQSPILATLMFHNSYCGGVINTINKSGHVTVSVYMDDIILSSDDMAQLNQAFDTVCEALRKSRYEVNENKTQSPSTMINVFNLELSGNSLRVSPERMVQFIQAYVKSDNEHERKGIASYVHSVNPDQARLHFSGGSKRTADGSEFEPKKKRKV

SEQ ID NO: 1682 - protein, 1691 aa, synthetic construct
MKRTADGSEFESPKKKRKVDKKYSIGLDIGTNSVGWAVITDEYKVPSKKFKVLGNTDRHSIKKNLIGALLFDSGETAEATRLKRTARRRYTRRKNRICYLQEIFSNEMAKVDDSFFHRLEESFLVEEDKKHERHPIFGNIVDEVAYHEKYPTIYHLRKKLVDSTDKADLRLIYLALAHMIKFRGHFLIEGDLNPDNSDVDKLFIQLVQTYNQLFEENPINASGVDAKAILSARLSKSRRLENLIAQLPGEKKNGLFGNLIALSLGLTPNFKSNFDLAEDAKLQLSKDTYDDDLDNLLAQIGDQYADLFLAAKNLSDAILLSDILRVNTEITKAPLSASMIKRYDEHHQDLTLLKALVRQQLPEKYKEIFFDQSKNGYAGYIDGGASQEEFYKFIKPILEKMDGTEELLVKLNREDLLRKQRTFDNGSIPHQIHLGELHAILRRQEDFYPFLKDNREKIEKILTFRIPYYVGPLARGNSRFAWMTRKSEETITPWNFEEVVDKGASAQSFIERMTNFDKNLPNEKVLPKHSLLYEYFTVYNELTKVKYVTEGMRKPAFLSGEQKKAIVDLLFKTNRKVTVKQLKEDYFKKIECFDSVEISGVEDRFNASLGTYHDLLKIIKDKDFLDNEENEDILEDIVLTLTLFEDREMIEERLKTYAHLFDDKVMKQLKRRRYTGWGRLSRKLINGIRDKQSGKTILDFLKSDGFANRNFMQLIHDDSLTFKEDIQKAQVSGQGDSLHEHIANLAGSPAIKKGILQTVKVVDELVKVMGRHKPENIVIEMARENQTTQKGQKNSRERMKRIEEGIKELGSQILKEHPVENTQLQNEKLYLYYLQNGRDMYVDQELDINRLSDYDVDAIVPQSFLKDDSIDNKVLTRSDKNRGKSDNVPSEEVVKKMKNYWRQLLNAKLITQRKFDNLTKAERGGLSELDKAGFIKRQLVETRQITKHVAQILDSRMNTKYDENDKLIREVKVITLKSKLVSDFRKDFQFYKVREINNYHHAHDAYLNAVVGTALIKKYPKLESEFVYGDYKVYDVRKMIAKSEQEIGKATAKYFFYSNIMNFFKTEITLANGEIRKRPLIETNGETGEIVWDKGRDFATVRKVLSMPQVNIVKKTEVQTGGFSKESILPKRNSDKLIARKKDWDPKKYGGFDSPTVAYSVLVVAKVEKGKSKKLKSVKELLGITIMERSSFEKNPIDFLEAKGYKEVKKDLIIKLPKYSLFELENGRKRMLASAGELQKGNELALPSKYVNFLYLASHYEKLKGSPEDNEQKQLFVEQHKHYLDEIIEQISEFSKRVILADANLDKVLSAYNKHRDKPIREQAENIIHLFTLTNLGAPAAFKYFDTTIDRKRYTSTKEVLDATLIHQSITGLYETRIDLSQLGGDSGGSSGGSSGSETPGTSESATPESSGGSSGGSSDKWKHKFELKENRWVYVPSEEMLKFGKKIHQYIRHKWKYPLYMYHLRDGGHVAAAKLHIKNDYFSLIDISDFFGSTSQSRVTDELKKLIPYAKAREIAKLSTVRIPNANGLKHAIPYGYPQSPILATLMFHNSYCGGVINTINKSGHVTVSVYMDDIILSPDDLAQLNQAFDTVCEALRKSRYEVNENKTQSPSTMINVFNLELSGNSLRVSPERMVQFIQAYVKSDNEHERKGCASYVWSVNPDQARLHFSGGSKRTADGSEFEPKKKRKV

SEQ ID NO: 1683 - protein, 1691 aa, synthetic construct
MKRTADGSEFESPKKKRKVDKKYSIGLDIGTNSVGWAVITDEYKVPSKKFKVLGNTDRHSIKKNLIGALLFDSGETAEATRLKRTARRRYTRRKNRICYLQEIFSNEMAKVDDSFFHRLEESFLVEEDKKHERHPIFGNIVDEVAYHEKYPTIYHLRKKLVDSTDKADLRLIYLALAHMIKFRGHFLIEGDLNPDNSDVDKLFIQLVQTYNQLFEENPINASGVDAKAILSARLSKSRRLENLIAQLPGEKKNGLFGNLIALSLGLTPNFKSNFDLAEDAKLQLSKDTYDDDLDNLLAQIGDQYADLFLAAKNLSDAILLSDILRVNTEITKAPLSASMIKRYDEHHQDLTLLKALVRQQLPEKYKEIFFDQSKNGYAGYIDGGASQEEFYKFIKPILEKMDGTEELLVKLNREDLLRKQRTFDNGSIPHQIHLGELHAILRRQEDFYPFLKDNREKIEKILTFRIPYYVGPLARGNSRFAWMTRKSEETITPWNFEEVVDKGASAQSFIERMTNFDKNLPNEKVLPKHSLLYEYFTVYNELTKVKYVTEGMRKPAFLSGEQKKAIVDLLFKTNRKVTVKQLKEDYFKKIECFDSVEISGVEDRFNASLGTYHDLLKIIKDKDFLDNEENEDILEDIVLTLTLFEDREMIEERLKTYAHLFDDKVMKQLKRRRYTGWGRLSRKLINGIRDKQSGKTILDFLKSDGFANRNFMQLIHDDSLTFKEDIQKAQVSGQGDSLHEHIANLAGSPAIKKGILQTVKVVDELVKVMGRHKPENIVIEMARENQTTQKGQKNSRERMKRIEEGIKELGSQILKEHPVENTQLQNEKLYLYYLQNGRDMYVDQELDINRLSDYDVDAIVPQSFLKDDSIDNKVLTRSDKNRGKSDNVPSEEVVKKMKNYWRQLLNAKLITQRKFDNLTKAERGGLSELDKAGFIKRQLVETRQITKHVAQILDSRMNTKYDENDKLIREVKVITLKSKLVSDFRKDFQFYKVREINNYHHAHDAYLNAVVGTALIKKYPKLESEFVYGDYKVYDVRKMIAKSEQEIGKATAKYFFYSNIMNFFKTEITLANGEIRKRPLIETNGETGEIVWDKGRDFATVRKVLSMPQVNIVKKTEVQTGGFSKESILPKRNSDKLIARKKDWDPKKYGGFDSPTVAYSVLVVAKVEKGKSKKLKSVKELLGITIMERSSFEKNPIDFLEAKGYKEVKKDLIIKLPKYSLFELENGRKRMLASAGELQKGNELALPSKYVNFLYLASHYEKLKGSPEDNEQKQLFVEQHKHYLDEIIEQISEFSKRVILADANLDKVLSAYNKHRDKPIREQAENIIHLFTLTNLGAPAAFKYFDTTIDRKRYTSTKEVLDATLIHQSITGLYETRIDLSQLGGDSGGSSGGSSGSETPGTSESATPESSGGSSGGSSDKWKHKFELKENRWVYVPSEEMLKFGKKIKQYIRHKWKYPLYMYHLRDGGHVAAAKLHIKNDYFSLIDISDFFGSTSQSRVTDELKKLIPYAKAREIAKLSTVRIPNANGLKHAIPYGYPQSPILATLMFHNSYCGGVINTINKSGHVTVSVYMDDITLSSDDLAQLNQAFDTVCEALRKSRYEVNENKTQSPSTMINVFNLELSGNSLRVSPERMVQFIQAYVPSDNEHEDKGIASYVHPVNPDQARLHFSGGSKRTADGSEFEPKKKRKV

SEQ ID NO: 1684 - protein, 1691 aa, synthetic construct
MKRTADGSEFESPKKKRKVDKKYSIGLDIGTNSVGWAVITDEYKVPSKKFKVLGNTDRHSIKKNLIGALLFDSGETAEATRLKRTARRRYTRRKNRICYLQEIFSNEMAKVDDSFFHRLEESFLVEEDKKHERHPIFGNIVDEVAYHEKYPTIYHLRKKLVDSTDKADLRLIYLALAHMIKFRGHFLIEGDLNPDNSDVDKLFIQLVQTYNQLFEENPINASGVDAKAILSARLSKSRRLENLIAQLPGEKKNGLFGNLIALSLGLTPNFKSNFDLAEDAKLQLSKDTYDDDLDNLLAQIGDQYADLFLAAKNLSDAILLSDILRVNTEITKAPLSASMIKRYDEHHQDLTLLKALVRQQLPEKYKEIFFDQSKNGYAGYIDGGASQEEFYKFIKPILEKMDGTEELLVKLNREDLLRKQRTFDNGSIPHQIHLGELHAILRRQEDFYPFLKDNREKIEKILTFRIPYYVGPLARGNSRFAWMTRKSEETITPWNFEEVVDKGASAQSFIERMTNFDKNLPNEKVLPKHSLLYEYFTVYNELTKVKYVTEGMRKPAFLSGEQKKAIVDLLFKTNRKVTVKQLKEDYFKKIECFDSVEISGVEDRFNASLGTYHDLLKIIKDKDFLDNEENEDILEDIVLTLTLFEDREMIEERLKTYAHLFDDKVMKQLKRRRYTGWGRLSRKLINGIRDKQSGKTILDFLKSDGFANRNFMQLIHDDSLTFKEDIQKAQVSGQGDSLHEHIANLAGSPAIKKGILQTVKVVDELVKVMGRHKPENIVIEMARENQTTQKGQKNSRERMKRIEEGIKELGSQILKEHPVENTQLQNEKLYLYYLQNGRDMYVDQELDINRLSDYDVDAIVPQSFLKDDSIDNKVLTRSDKNRGKSDNVPSEEVVKKMKNYWRQLLNAKLITQRKFDNLTKAERGGLSELDKAGFIKRQLVETRQITKHVAQILDSRMNTKYDENDKLIREVKVITLKSKLVSDFRKDFQFYKVREINNYHHAHDAYLNAVVGTALIKKYPKLESEFVYGDYKVYDVRKMIAKSEQEIGKATAKYFFYSNIMNFFKTEITLANGEIRKRPLIETNGETGEIVWDKGRDFATVRKVLSMPQVNIVKKTEVQTGGFSKESILPKRNSDKLIARKKDWDPKKYGGFDSPTVAYSVLVVAKVEKGKSKKLKSVKELLGITIMERSSFEKNPIDFLEAKGYKEVKKDLIIKLPKYSLFELENGRKRMLASAGELQKGNELALPSKYVNFLYLASHYEKLKGSPEDNEQKQLFVEQHKHYLDEIIEQISEFSKRVILADANLDKVLSAYNKHRDKPIREQAENIIHLFTLTNLGAPAAFKYFDTTIDRKRYTSTKEVLDATLIHQSITGLYETRIDLSQLGGDSGGSSGGSSGSETPGTSESATPESSGGSSGGSSDKWKHKFELKENRWVYVPSEEMLKFGKKIHQYIRHKWKYPLYMYHLRDGGHVAAAKLHEKNDYFSLIDISDFFGSTMQSRVTDELKKLIPYAKAREIAKLSTVRIPNANGLKHAIPYGYPQSPILATLMFHNSYCGGVINTINKSGHVTVSVYMDDIILSSDDLAQLNQAFDTVCEALRKSRYEVNENKTQSPSTMINVFNLELSGNSLRVSPERPVWFIQAYVKSDNEHERKGIASLVHSVNPDQARLHFSGGSKRTADGSEFEPKKKRKV

SEQ ID NO: 1685 - protein, 1691 aa, synthetic construct
MKRTADGSEFESPKKKRKVDKKYSIGLDIGTNSVGWAVITDEYKVPSKKFKVLGNTDRHSIKKNLIGALLFDSGETAEATRLKRTARRRYTRRKNRICYLQEIFSNEMAKVDDSFFHRLEESFLVEEDKKHERHPIFGNIVDEVAYHEKYPTIYHLRKKLVDSTDKADLRLIYLALAHMIKFRGHFLIEGDLNPDNSDVDKLFIQLVQTYNQLFEENPINASGVDAKAILSARLSKSRRLENLIAQLPGEKKNGLFGNLIALSLGLTPNFKSNFDLAEDAKLQLSKDTYDDDLDNLLAQIGDQYADLFLAAKNLSDAILLSDILRVNTEITKAPLSASMIKRYDEHHQDLTLLKALVRQQLPEKYKEIFFDQSKNGYAGYIDGGASQEEFYKFIKPILEKMDGTEELLVKLNREDLLRKQRTFDNGSIPHQIHLGELHAILRRQEDFYPFLKDNREKIEKILTFRIPYYVGPLARGNSRFAWMTRKSEETITPWNFEEVVDKGASAQSFIERMTNFDKNLPNEKVLPKHSLLYEYFTVYNELTKVKYVTEGMRKPAFLSGEQKKAIVDLLFKTNRKVTVKQLKEDYFKKIECFDSVEISGVEDRFNASLGTYHDLLKIIKDKDFLDNEENEDILEDIVLTLTLFEDREMIEERLKTYAHLFDDKVMKQLKRRRYTGWGRLSRKLINGIRDKQSGKTILDFLKSDGFANRNFMQLIHDDSLTFKEDIQKAQVSGQGDSLHEHIANLAGSPAIKKGILQTVKVVDELVKVMGRHKPENIVIEMARENQTTQKGQKNSRERMKRIEEGIKELGSQILKEHPVENTQLQNEKLYLYYLQNGRDMYVDQELDINRLSDYDVDAIVPQSFLKDDSIDNKVLTRSDKNRGKSDNVPSEEVVKKMKNYWRQLLNAKLITQRKFDNLTKAERGGLSELDKAGFIKRQLVETRQITKHVAQILDSRMNTKYDENDKLIREVKVITLKSKLVSDFRKDFQFYKVREINNYHHAHDAYLNAVVGTALIKKYPKLESEFVYGDYKVYDVRKMIAKSEQEIGKATAKYFFYSNIMNFFKTEITLANGEIRKRPLIETNGETGEIVWDKGRDFATVRKVLSMPQVNIVKKTEVQTGGFSKESILPKRNSDKLIARKKDWDPKKYGGFDSPTVAYSVLVVAKVEKGKSKKLKSVKELLGITIMERSSFEKNPIDFLEAKGYKEVKKDLIIKLPKYSLFELENGRKRMLASAGELQKGNELALPSKYVNFLYLASHYEKLKGSPEDNEQKQLFVEQHKHYLDEIIEQISEFSKRVILADANLDKVLSAYNKHRDKPIREQAENIIHLFTLTNLGAPAAFKYFDTTIDRKRYTSTKEVLDATLIHQSITGLYETRIDLSQLGGDSGGSSGGSSGSETPGTSESATPESSGGSSGGSSDKWKHAFELKENRWVYVPSEEMLKFGKKIHQYIRHKWKYPLYMYHLRDGGHVAAAKLHIKNDYFSLIDISDFFGSTSQSRVTDELKKLIPYAKAREIAKLSTVRIPNANGLKHAIPYGYPQSPILATLMFHNSYCGGVINTINKSGHVTVSVYMDDIILSSDDLAQLNQAFDTVCEALRKSRYEVNENKTQSPSTMINNFNLELSGNSLRVSPERMVQFIQAYVKSDMEHERKGIASYVHSVNPDQARLHFSGGSKRTADGSEFEPKKKRKV

SEQ ID NO: 1686 - protein, 1691 aa, synthetic construct
MKRTADGSEFESPKKKRKVDKKYSIGLDIGTNSVGWAVITDEYKVPSKKFKVLGNTDRHSIKKNLIGALLFDSGETAEATRLKRTARRRYTRRKNRICYLQEIFSNEMAKVDDSFFHRLEESFLVEEDKKHERHPIFGNIVDEVAYHEKYPTIYHLRKKLVDSTDKADLRLIYLALAHMIKFRGHFLIEGDLNPDNSDVDKLFIQLVQTYNQLFEENPINASGVDAKAILSARLSKSRRLENLIAQLPGEKKNGLFGNLIALSLGLTPNFKSNFDLAEDAKLQLSKDTYDDDLDNLLAQIGDQYADLFLAAKNLSDAILLSDILRVNTEITKAPLSASMIKRYDEHHQDLTLLKALVRQQLPEKYKEIFFDQSKNGYAGYIDGGASQEEFYKFIKPILEKMDGTEELLVKLNREDLLRKQRTFDNGSIPHQIHLGELHAILRRQEDFYPFLKDNREKIEKILTFRIPYYVGPLARGNSRFAWMTRKSEETITPWNFEEVVDKGASAQSFIERMTNFDKNLPNEKVLPKHSLLYEYFTVYNELTKVKYVTEGMRKPAFLSGEQKKAIVDLLFKTNRKVTVKQLKEDYFKKIECFDSVEISGVEDRFNASLGTYHDLLKIIKDKDFLDNEENEDILEDIVLTLTLFEDREMIEERLKTYAHLFDDKVMKQLKRRRYTGWGRLSRKLINGIRDKQSGKTILDFLKSDGFANRNFMQLIHDDSLTFKEDIQKAQVSGQGDSLHEHIANLAGSPAIKKGILQTVKVVDELVKVMGRHKPENIVIEMARENQTTQKGQKNSRERMKRIEEGIKELGSQILKEHPVENTQLQNEKLYLYYLQNGRDMYVDQELDINRLSDYDVDAIVPQSFLKDDSIDNKVLTRSDKNRGKSDNVPSEEVVKKMKNYWRQLLNAKLITQRKFDNLTKAERGGLSELDKAGFIKRQLVETRQITKHVAQILDSRMNTKYDENDKLIREVKVITLKSKLVSDFRKDFQFYKVREINNYHHAHDAYLNAVVGTALIKKYPKLESEFVYGDYKVYDVRKMIAKSEQEIGKATAKYFFYSNIMNFFKTEITLANGEIRKRPLIETNGETGEIVWDKGRDFATVRKVLSMPQVNIVKKTEVQTGGFSKESILPKRNSDKLIARKKDWDPKKYGGFDSPTVAYSVLVVAKVEKGKSKKLKSVKELLGITIMERSSFEKNPIDFLEAKGYKEVKKDLIIKLPKYSLFELENGRKRMLASAGELQKGNELALPSKYVNFLYLASHYEKLKGSPEDNEQKQLFVEQHKHYLDEIIEQISEFSKRVILADANLDKVLSAYNKHRDKPIREQAENIIHLFTLTNLGAPAAFKYFDTTIDRKRYTSTKEVLDATLIHQSITGLYETRIDLSQLGGDSGGSSGGSSGSETPGTSESATPESSGGSSGGSSDKWKHKFELKENRWVYVPSEEMLKFGKKIHQYIMHKWKYPLYMYHLRDGGHVAAAKLHIKNDYFSLIDISDFFGSTSQSRVTDELKKLIPYAKAREIAILSTVRIPNANGLKHAIPYGYPQSPILATLMFHNSYCGGVINTINKSGHVTVSVYMDDIILSSDDLAQLHQAFDWVCEALRKSRYEVNENKTQSPSTMINVFNLELSGNSLRVSPERMVQFIQAYVKSDNEHERKGIASYVHSVNPDQARLHFSGGSKRTADGSEFEPKKKRKV

SEQ ID NO: 1687 - protein, 1691 aa, synthetic construct
MKRTADGSEFESPKKKRKVDKKYSIGLDIGTNSVGWAVITDEYKVPSKKFKVLGNTDRHSIKKNLIGALLFDSGETAEATRLKRTARRRYTRRKNRICYLQEIFSNEMAKVDDSFFHRLEESFLVEEDKKHERHPIFGNIVDEVAYHEKYPTIYHLRKKLVDSTDKADLRLIYLALAHMIKFRGHFLIEGDLNPDNSDVDKLFIQLVQTYNQLFEENPINASGVDAKAILSARLSKSRRLENLIAQLPGEKKNGLFGNLIALSLGLTPNFKSNFDLAEDAKLQLSKDTYDDDLDNLLAQIGDQYADLFLAAKNLSDAILLSDILRVNTEITKAPLSASMIKRYDEHHQDLTLLKALVRQQLPEKYKEIFFDQSKNGYAGYIDGGASQEEFYKFIKPILEKMDGTEELLVKLNREDLLRKQRTFDNGSIPHQIHLGELHAILRRQEDFYPFLKDNREKIEKILTFRIPYYVGPLARGNSRFAWMTRKSEETITPWNFEEVVDKGASAQSFIERMTNFDKNLPNEKVLPKHSLLYEYFTVYNELTKVKYVTEGMRKPAFLSGEQKKAIVDLLFKTNRKVTVKQLKEDYFKKIECFDSVEISGVEDRFNASLGTYHDLLKIIKDKDFLDNEENEDILEDIVLTLTLFEDREMIEERLKTYAHLFDDKVMKQLKRRRYTGWGRLSRKLINGIRDKQSGKTILDFLKSDGFANRNFMQLIHDDSLTFKEDIQKAQVSGQGDSLHEHIANLAGSPAIKKGILQTVKVVDELVKVMGRHKPENIVIEMARENQTTQKGQKNSRERMKRIEEGIKELGSQILKEHPVENTQLQNEKLYLYYLQNGRDMYVDQELDINRLSDYDVDAIVPQSFLKDDSIDNKVLTRSDKNRGKSDNVPSEEVVKKMKNYWRQLLNAKLITQRKFDNLTKAERGGLSELDKAGFIKRQLVETRQITKHVAQILDSRMNTKYDENDKLIREVKVITLKSKLVSDFRKDFQFYKVREINNYHHAHDAYLNAVVGTALIKKYPKLESEFVYGDYKVYDVRKMIAKSEQEIGKATAKYFFYSNIMNFFKTEITLANGEIRKRPLIETNGETGEIVWDKGRDFATVRKVLSMPQVNIVKKTEVQTGGFSKESILPKRNSDKLIARKKDWDPKKYGGFDSPTVAYSVLVVAKVEKGKSKKLKSVKELLGITIMERSSFEKNPIDFLEAKGYKEVKKDLIIKLPKYSLFELENGRKRMLASAGELQKGNELALPSKYVNFLYLASHYEKLKGSPEDNEQKQLFVEQHKHYLDEIIEQISEFSKRVILADANLDKVLSAYNKHRDKPIREQAENIIHLFTLTNLGAPAAFKYFDTTIDRKRYTSTKEVLDATLIHQSITGLYETRIDLSQLGGDSGGSSGGSSGSETPGTSESATPESSGGSSGGSSDKWKHKFELKENRWVYVPSEEMLKFGKKIHQYIRHKWKYPLYMYHLRDGGHVAAAKLHIKNDYFSLIDYSDFFGSTSQSRVTDELKKLIPYAKAREIAKLSTVRLPNANGLKHAIPYGYPQSPILATLMFHNSYCGGVINTINKSGHVTVSVYMDDIILSSDDLAQLNQAFDTVCEALRGSRYEVNENKTQSPSTMINVFNLELSGNSLRVSPERMVQFIQAYVKSDTEHERKGIASYVHSVNPDQARLHFSGGSKRTADGSEFEPKKKRKV

SEQ ID NO: 1688 - protein, 1691 aa, synthetic construct
MKRTADGSEFESPKKKRKVDKKYSIGLDIGTNSVGWAVITDEYKVPSKKFKVLGNTDRHSIKKNLIGALLFDSGETAEATRLKRTARRRYTRRKNRICYLQEIFSNEMAKVDDSFFHRLEESFLVEEDKKHERHPIFGNIVDEVAYHEKYPTIYHLRKKLVDSTDKADLRLIYLALAHMIKFRGHFLIEGDLNPDNSDVDKLFIQLVQTYNQLFEENPINASGVDAKAILSARLSKSRRLENLIAQLPGEKKNGLFGNLIALSLGLTPNFKSNFDLAEDAKLQLSKDTYDDDLDNLLAQIGDQYADLFLAAKNLSDAILLSDILRVNTEITKAPLSASMIKRYDEHHQDLTLLKALVRQQLPEKYKEIFFDQSKNGYAGYIDGGASQEEFYKFIKPILEKMDGTEELLVKLNREDLLRKQRTFDNGSIPHQIHLGELHAILRRQEDFYPFLKDNREKIEKILTFRIPYYVGPLARGNSRFAWMTRKSEETITPWNFEEVVDKGASAQSFIERMTNFDKNLPNEKVLPKHSLLYEYFTVYNELTKVKYVTEGMRKPAFLSGEQKKAIVDLLFKTNRKVTVKQLKEDYFKKIECFDSVEISGVEDRFNASLGTYHDLLKIIKDKDFLDNEENEDILEDIVLTLTLFEDREMIEERLKTYAHLFDDKVMKQLKRRRYTGWGRLSRKLINGIRDKQSGKTILDFLKSDGFANRNFMQLIHDDSLTFKEDIQKAQVSGQGDSLHEHIANLAGSPAIKKGILQTVKVVDELVKVMGRHKPENIVIEMARENQTTQKGQKNSRERMKRIEEGIKELGSQILKEHPVENTQLQNEKLYLYYLQNGRDMYVDQELDINRLSDYDVDAIVPQSFLKDDSIDNKVLTRSDKNRGKSDNVPSEEVVKKMKNYWRQLLNAKLITQRKFDNLTKAERGGLSELDKAGFIKRQLVETRQITKHVAQILDSRMNTKYDENDKLIREVKVITLKSKLVSDFRKDFQFYKVREINNYHHAHDAYLNAVVGTALIKKYPKLESEFVYGDYKVYDVRKMIAKSEQEIGKATAKYFFYSNIMNFFKTEITLANGEIRKRPLIETNGETGEIVWDKGRDFATVRKVLSMPQVNIVKKTEVQTGGFSKESILPKRNSDKLIARKKDWDPKKYGGFDSPTVAYSVLVVAKVEKGKSKKLKSVKELLGITIMERSSFEKNPIDFLEAKGYKEVKKDLIIKLPKYSLFELENGRKRMLASAGELQKGNELALPSKYVNFLYLASHYEKLKGSPEDNEQKQLFVEQHKHYLDEIIEQISEFSKRVILADANLDKVLSAYNKHRDKPIREQAENIIHLFTLTNLGAPAAFKYFDTTIDRKRYTSTKEVLDATLIHQSITGLYETRIDLSQLGGDSGGSSGGSSGSETPGTSESATPESSGGSSGGSSDKWKHKFELKENRWVYVPSEEMLKFGKKIHQYIRHKWKYPLYMVHLTDCGHVAAAKLHIKNDYFSLIDISDFFGSTSQSRVTDELKKLIPYAKAREIAKLSTVRIPNANGLKHAIPYGYPQSPILATLMFHNSYCGGVINTINKSGHVTVSVYMDDIILSSDDLAQLNQAFDTVCEALRKSRYEVNENKTQSPSTMINVFNLELSGNSLRVSPERMVQFIQAYVFSDNEHERKGIASYVHSGNPDQARLHFSGGSKRTADGSEFEPKKKRKV

SEQ ID NO: 1689 - protein, 1691 aa, synthetic construct
MKRTADGSEFESPKKKRKVDKKYSIGLDIGTNSVGWAVITDEYKVPSKKFKVLGNTDRHSIKKNLIGALLFDSGETAEATRLKRTARRRYTRRKNRICYLQEIFSNEMAKVDDSFFHRLEESFLVEEDKKHERHPIFGNIVDEVAYHEKYPTIYHLRKKLVDSTDKADLRLIYLALAHMIKFRGHFLIEGDLNPDNSDVDKLFIQLVQTYNQLFEENPINASGVDAKAILSARLSKSRRLENLIAQLPGEKKNGLFGNLIALSLGLTPNFKSNFDLAEDAKLQLSKDTYDDDLDNLLAQIGDQYADLFLAAKNLSDAILLSDILRVNTEITKAPLSASMIKRYDEHHQDLTLLKALVRQQLPEKYKEIFFDQSKNGYAGYIDGGASQEEFYKFIKPILEKMDGTEELLVKLNREDLLRKQRTFDNGSIPHQIHLGELHAILRRQEDFYPFLKDNREKIEKILTFRIPYYVGPLARGNSRFAWMTRKSEETITPWNFEEVVDKGASAQSFIERMTNFDKNLPNEKVLPKHSLLYEYFTVYNELTKVKYVTEGMRKPAFLSGEQKKAIVDLLFKTNRKVTVKQLKEDYFKKIECFDSVEISGVEDRFNASLGTYHDLLKIIKDKDFLDNEENEDILEDIVLTLTLFEDREMIEERLKTYAHLFDDKVMKQLKRRRYTGWGRLSRKLINGIRDKQSGKTILDFLKSDGFANRNFMQLIHDDSLTFKEDIQKAQVSGQGDSLHEHIANLAGSPAIKKGILQTVKVVDELVKVMGRHKPENIVIEMARENQTTQKGQKNSRERMKRIEEGIKELGSQILKEHPVENTQLQNEKLYLYYLQNGRDMYVDQELDINRLSDYDVDAIVPQSFLKDDSIDNKVLTRSDKNRGKSDNVPSEEVVKKMKNYWRQLLNAKLITQRKFDNLTKAERGGLSELDKAGFIKRQLVETRQITKHVAQILDSRMNTKYDENDKLIREVKVITLKSKLVSDFRKDFQFYKVREINNYHHAHDAYLNAVVGTALIKKYPKLESEFVYGDYKVYDVRKMIAKSEQEIGKATAKYFFYSNIMNFFKTEITLANGEIRKRPLIETNGETGEIVWDKGRDFATVRKVLSMPQVNIVKKTEVQTGGFSKESILPKRNSDKLIARKKDWDPKKYGGFDSPTVAYSVLVVAKVEKGKSKKLKSVKELLGITIMERSSFEKNPIDFLEAKGYKEVKKDLIIKLPKYSLFELENGRKRMLASAGELQKGNELALPSKYVNFLYLASHYEKLKGSPEDNEQKQLFVEQHKHYLDEIIEQISEFSKRVILADANLDKVLSAYNKHRDKPIREQAENIIHLFTLTNLGAPAAFKYFDTTIDRKRYTSTKEVLDATLIHQSITGLYETRIDLSQLGGDSGGSSGGSSGSETPGTSESATPESSGGSSGGSSDKWKHKFELKENRWVYVPSEEMLKFGDKIHQYIRHKWKYPLYMYHLRDGGHVAAAKLHIKNDYLSLIDISDFFGSTSQSRVTDELKKLIPYAKAREIAKLSTVRIPNANGLKHAIPYGYPDSPILATLMFHNSYCGGVINTINKSGHVTVSVYMDDIILSSDDLAQLNQAFDTVCEALRKSRYEVNENKTQSPSTMINVFNLELSGNSLRVSPERMVQFIQAYVKSDNEHERKGIASYVHVVNPDQAFLHFSGGSKRTADGSEFEPKKKRKV

SEQ ID NO: 1690 - protein, 1691 aa, synthetic construct
MKRTADGSEFESPKKKRKVDKKYSIGLDIGTNSVGWAVITDEYKVPSKKFKVLGNTDRHSIKKNLIGALLFDSGETAEATRLKRTARRRYTRRKNRICYLQEIFSNEMAKVDDSFFHRLEESFLVEEDKKHERHPIFGNIVDEVAYHEKYPTIYHLRKKLVDSTDKADLRLIYLALAHMIKFRGHFLIEGDLNPDNSDVDKLFIQLVQTYNQLFEENPINASGVDAKAILSARLSKSRRLENLIAQLPGEKKNGLFGNLIALSLGLTPNFKSNFDLAEDAKLQLSKDTYDDDLDNLLAQIGDQYADLFLAAKNLSDAILLSDILRVNTEITKAPLSASMIKRYDEHHQDLTLLKALVRQQLPEKYKEIFFDQSKNGYAGYIDGGASQEEFYKFIKPILEKMDGTEELLVKLNREDLLRKQRTFDNGSIPHQIHLGELHAILRRQEDFYPFLKDNREKIEKILTFRIPYYVGPLARGNSRFAWMTRKSEETITPWNFEEVVDKGASAQSFIERMTNFDKNLPNEKVLPKHSLLYEYFTVYNELTKVKYVTEGMRKPAFLSGEQKKAIVDLLFKTNRKVTVKQLKEDYFKKIECFDSVEISGVEDRFNASLGTYHDLLKIIKDKDFLDNEENEDILEDIVLTLTLFEDREMIEERLKTYAHLFDDKVMKQLKRRRYTGWGRLSRKLINGIRDKQSGKTILDFLKSDGFANRNFMQLIHDDSLTFKEDIQKAQVSGQGDSLHEHIANLAGSPAIKKGILQTVKVVDELVKVMGRHKPENIVIEMARENQTTQKGQKNSRERMKRIEEGIKELGSQILKEHPVENTQLQNEKLYLYYLQNGRDMYVDQELDINRLSDYDVDAIVPQSFLKDDSIDNKVLTRSDKNRGKSDNVPSEEVVKKMKNYWRQLLNAKLITQRKFDNLTKAERGGLSELDKAGFIKRQLVETRQITKHVAQILDSRMNTKYDENDKLIREVKVITLKSKLVSDFRKDFQFYKVREINNYHHAHDAYLNAVVGTALIKKYPKLESEFVYGDYKVYDVRKMIAKSEQEIGKATAKYFFYSNIMNFFKTEITLANGEIRKRPLIETNGETGEIVWDKGRDFATVRKVLSMPQVNIVKKTEVQTGGFSKESILPKRNSDKLIARKKDWDPKKYGGFDSPTVAYSVLVVAKVEKGKSKKLKSVKELLGITIMERSSFEKNPIDFLEAKGYKEVKKDLIIKLPKYSLFELENGRKRMLASAGELQKGNELALPSKYVNFLYLASHYEKLKGSPEDNEQKQLFVEQHKHYLDEIIEQISEFSKRVILADANLDKVLSAYNKHRDKPIREQAENIIHLFTLTNLGAPAAFKYFDTTIDRKRYTSTKEVLDATLIHQSITGLYETRIDLSQLGGDSGGSSGGSSGSETPGTSESATPESSGGSSGGSSDKWKHKFELKENRWVTVPSEEMLKFGKKIHQYIRHKWKYPLYMYHLEDGGHVAAAKLHIKNDYFSLIDISYFFGSTSQSRVTDELKKLIPYAKAREIAKLSTVRIPNANGLKHAIPYGYPQSPILATLMFHNSYCGGVINTINKSGHVTVSVYMDDIILSSDDLAQLTQAFDTVCEALRKSRYEVNENKTQSPSGMINVFNLELSGNSLRVSPERMVQFIQAYVKSDNEHERSGIASYVHGVNPDQARLHFSGGSKRTADGSEFEPKKKRKV

SEQ ID NO: 1691 - protein, 1691 aa, synthetic construct
MKRTADGSEFESPKKKRKVDKKYSIGLDIGTNSVGWAVITDEYKVPSKKFKVLGNTDRHSIKKNLIGALLFDSGETAEATRLKRTARRRYTRRKNRICYLQEIFSNEMAKVDDSFFHRLEESFLVEEDKKHERHPIFGNIVDEVAYHEKYPTIYHLRKKLVDSTDKADLRLIYLALAHMIKFRGHFLIEGDLNPDNSDVDKLFIQLVQTYNQLFEENPINASGVDAKAILSARLSKSRRLENLIAQLPGEKKNGLFGNLIALSLGLTPNFKSNFDLAEDAKLQLSKDTYDDDLDNLLAQIGDQYADLFLAAKNLSDAILLSDILRVNTEITKAPLSASMIKRYDEHHQDLTLLKALVRQQLPEKYKEIFFDQSKNGYAGYIDGGASQEEFYKFIKPILEKMDGTEELLVKLNREDLLRKQRTFDNGSIPHQIHLGELHAILRRQEDFYPFLKDNREKIEKILTFRIPYYVGPLARGNSRFAWMTRKSEETITPWNFEEVVDKGASAQSFIERMTNFDKNLPNEKVLPKHSLLYEYFTVYNELTKVKYVTEGMRKPAFLSGEQKKAIVDLLFKTNRKVTVKQLKEDYFKKIECFDSVEISGVEDRFNASLGTYHDLLKIIKDKDFLDNEENEDILEDIVLTLTLFEDREMIEERLKTYAHLFDDKVMKQLKRRRYTGWGRLSRKLINGIRDKQSGKTILDFLKSDGFANRNFMQLIHDDSLTFKEDIQKAQVSGQGDSLHEHIANLAGSPAIKKGILQTVKVVDELVKVMGRHKPENIVIEMARENQTTQKGQKNSRERMKRIEEGIKELGSQILKEHPVENTQLQNEKLYLYYLQNGRDMYVDQELDINRLSDYDVDAIVPQSFLKDDSIDNKVLTRSDKNRGKSDNVPSEEVVKKMKNYWRQLLNAKLITQRKFDNLTKAERGGLSELDKAGFIKRQLVETRQITKHVAQILDSRMNTKYDENDKLIREVKVITLKSKLVSDFRKDFQFYKVREINNYHHAHDAYLNAVVGTALIKKYPKLESEFVYGDYKVYDVRKMIAKSEQEIGKATAKYFFYSNIMNFFKTEITLANGEIRKRPLIETNGETGEIVWDKGRDFATVRKVLSMPQVNIVKKTEVQTGGFSKESILPKRNSDKLIARKKDWDPKKYGGFDSPTVAYSVLVVAKVEKGKSKKLKSVKELLGITIMERSSFEKNPIDFLEAKGYKEVKKDLIIKLPKYSLFELENGRKRMLASAGELQKGNELALPSKYVNFLYLASHYEKLKGSPEDNEQKQLFVEQHKHYLDEIIEQISEFSKRVILADANLDKVLSAYNKHRDKPIREQAENIIHLFTLTNLGAPAAFKYFDTTIDRKRYTSTKEVLDATLIHQSITGLYETRIDLSQLGGDSGGSSGGSSGSETPGTSESATPESSGGSSGGSSDKWKHKFELKENRWVYVPSEEMLKFGKKIHQYIRHKWKYPLYMYHLRDGGHVAAAKLHIKNDCFSLIDISDFFGSTSQSRVTDELKKLIPYAKAREIAKLSTVRIPNANGLKHAIPYGYPQSPILATLMFHNSYCGGVINTINKSGHVTVSVYMDDIQLSSDDLAQLNQAFDTVCEALEKSRYEVNENKTQSPSTMINVFNLELSGNSLRVSPERMVQFQQAYVKSDNEHERKGIASYVHSPNPDQARLHFSGGSKRTADGSEFEPKKKRKV

SEQ ID NO: 1692 - protein, 1691 aa, synthetic construct
MKRTADGSEFESPKKKRKVDKKYSIGLDIGTNSVGWAVITDEYKVPSKKFKVLGNTDRHSIKKNLIGALLFDSGETAEATRLKRTARRRYTRRKNRICYLQEIFSNEMAKVDDSFFHRLEESFLVEEDKKHERHPIFGNIVDEVAYHEKYPTIYHLRKKLVDSTDKADLRLIYLALAHMIKFRGHFLIEGDLNPDNSDVDKLFIQLVQTYNQLFEENPINASGVDAKAILSARLSKSRRLENLIAQLPGEKKNGLFGNLIALSLGLTPNFKSNFDLAEDAKLQLSKDTYDDDLDNLLAQIGDQYADLFLAAKNLSDAILLSDILRVNTEITKAPLSASMIKRYDEHHQDLTLLKALVRQQLPEKYKEIFFDQSKNGYAGYIDGGASQEEFYKFIKPILEKMDGTEELLVKLNREDLLRKQRTFDNGSIPHQIHLGELHAILRRQEDFYPFLKDNREKIEKILTFRIPYYVGPLARGNSRFAWMTRKSEETITPWNFEEVVDKGASAQSFIERMTNFDKNLPNEKVLPKHSLLYEYFTVYNELTKVKYVTEGMRKPAFLSGEQKKAIVDLLFKTNRKVTVKQLKEDYFKKIECFDSVEISGVEDRFNASLGTYHDLLKIIKDKDFLDNEENEDILEDIVLTLTLFEDREMIEERLKTYAHLFDDKVMKQLKRRRYTGWGRLSRKLINGIRDKQSGKTILDFLKSDGFANRNFMQLIHDDSLTFKEDIQKAQVSGQGDSLHEHIANLAGSPAIKKGILQTVKVVDELVKVMGRHKPENIVIEMARENQTTQKGQKNSRERMKRIEEGIKELGSQILKEHPVENTQLQNEKLYLYYLQNGRDMYVDQELDINRLSDYDVDAIVPQSFLKDDSIDNKVLTRSDKNRGKSDNVPSEEVVKKMKNYWRQLLNAKLITQRKFDNLTKAERGGLSELDKAGFIKRQLVETRQITKHVAQILDSRMNTKYDENDKLIREVKVITLKSKLVSDFRKDFQFYKVREINNYHHAHDAYLNAVVGTALIKKYPKLESEFVYGDYKVYDVRKMIAKSEQEIGKATAKYFFYSNIMNFFKTEITLANGEIRKRPLIETNGETGEIVWDKGRDFATVRKVLSMPQVNIVKKTEVQTGGFSKESILPKRNSDKLIARKKDWDPKKYGGFDSPTVAYSVLVVAKVEKGKSKKLKSVKELLGITIMERSSFEKNPIDFLEAKGYKEVKKDLIIKLPKYSLFELENGRKRMLASAGELQKGNELALPSKYVNFLYLASHYEKLKGSPEDNEQKQLFVEQHKHYLDEIIEQISEFSKRVILADANLDKVLSAYNKHRDKPIREQAENIIHLFTLTNLGAPAAFKYFDTTIDRKRYTSTKEVLDATLIHQSITGLYETRIDLSQLGGDSGGSSGGSSGSETPGTSESATPESSGGSSGGSSDKWKHKFELKENRWVYVPSEEMLKFGKKIHQYIRHKWGYPLYMYHLRDGGHVAAAKLHIKNDYFSLIDIMDFFGSTSQSRVTDELKKLIPYAKAREIAKYSTVRIPNANGLKHAIPYGYPQSPILATLMFHNSYCGGVINTINKSGHVTVSVYMDDIILSSDDLAQRNQAFYTVCEALRKSRYEVNENKTQSPSTMINVFNLELSGNSLRVSPERMVQFIQAYVKSDNEHERKGIASYVHSVNPDQARLHFSGGSKRTADGSEFEPKKKRKV

SEQ ID NO: 1693 - protein, 1691 aa, synthetic construct
MKRTADGSEFESPKKKRKVDKKYSIGLDIGTNSVGWAVITDEYKVPSKKFKVLGNTDRHSIKKNLIGALLFDSGETAEATRLKRTARRRYTRRKNRICYLQEIFSNEMAKVDDSFFHRLEESFLVEEDKKHERHPIFGNIVDEVAYHEKYPTIYHLRKKLVDSTDKADLRLIYLALAHMIKFRGHFLIEGDLNPDNSDVDKLFIQLVQTYNQLFEENPINASGVDAKAILSARLSKSRRLENLIAQLPGEKKNGLFGNLIALSLGLTPNFKSNFDLAEDAKLQLSKDTYDDDLDNLLAQIGDQYADLFLAAKNLSDAILLSDILRVNTEITKAPLSASMIKRYDEHHQDLTLLKALVRQQLPEKYKEIFFDQSKNGYAGYIDGGASQEEFYKFIKPILEKMDGTEELLVKLNREDLLRKQRTFDNGSIPHQIHLGELHAILRRQEDFYPFLKDNREKIEKILTFRIPYYVGPLARGNSRFAWMTRKSEETITPWNFEEVVDKGASAQSFIERMTNFDKNLPNEKVLPKHSLLYEYFTVYNELTKVKYVTEGMRKPAFLSGEQKKAIVDLLFKTNRKVTVKQLKEDYFKKIECFDSVEISGVEDRFNASLGTYHDLLKIIKDKDFLDNEENEDILEDIVLTLTLFEDREMIEERLKTYAHLFDDKVMKQLKRRRYTGWGRLSRKLINGIRDKQSGKTILDFLKSDGFANRNFMQLIHDDSLTFKEDIQKAQVSGQGDSLHEHIANLAGSPAIKKGILQTVKVVDELVKVMGRHKPENIVIEMARENQTTQKGQKNSRERMKRIEEGIKELGSQILKEHPVENTQLQNEKLYLYYLQNGRDMYVDQELDINRLSDYDVDAIVPQSFLKDDSIDNKVLTRSDKNRGKSDNVPSEEVVKKMKNYWRQLLNAKLITQRKFDNLTKAERGGLSELDKAGFIKRQLVETRQITKHVAQILDSRMNTKYDENDKLIREVKVITLKSKLVSDFRKDFQFYKVREINNYHHAHDAYLNAVVGTALIKKYPKLESEFVYGDYKVYDVRKMIAKSEQEIGKATAKYFFYSNIMNFFKTEITLANGEIRKRPLIETNGETGEIVWDKGRDFATVRKVLSMPQVNIVKKTEVQTGGFSKESILPKRNSDKLIARKKDWDPKKYGGFDSPTVAYSVLVVAKVEKGKSKKLKSVKELLGITIMERSSFEKNPIDFLEAKGYKEVKKDLIIKLPKYSLFELENGRKRMLASAGELQKGNELALPSKYVNFLYLASHYEKLKGSPEDNEQKQLFVEQHKHYLDEIIEQISEFSKRVILADANLDKVLSAYNKHRDKPIREQAENIIHLFTLTNLGAPAAFKYFDTTIDRKRYTSTKEVLDATLIHQSITGLYETRIDLSQLGGDSGGSSGGSSGSETPGTSESATPESSGGSSGGSSDKWKHKFELKENRWVYVPSEEMLKFGKQIHQYPRHKWKYPLYMYHLRDGGHVAAAKDHIKNDYFSLIDISDFFGSTSQSRVTDELKKLIPYAKAREIAKLSTVRIPNANGLKHAIPYGYPQSPILATLMFHNSYCGGVINTINKSGHVTVSVYMDDIILSSDDLAQLNQAFDTVCEALRKSRYEVNENKTQSPSTMINVFNLELSGNSLRVSPERMVQFIQAYVYSDNEHERKGIASYVHSVNNDQARLHFSGGSKRTADGSEFEPKKKRKV

SEQ ID NO: 1694 - protein, 1691 aa, synthetic construct
MKRTADGSEFESPKKKRKVDKKYSIGLDIGTNSVGWAVITDEYKVPSKKFKVLGNTDRHSIKKNLIGALLFDSGETAEATRLKRTARRRYTRRKNRICYLQEIFSNEMAKVDDSFFHRLEESFLVEEDKKHERHPIFGNIVDEVAYHEKYPTIYHLRKKLVDSTDKADLRLIYLALAHMIKFRGHFLIEGDLNPDNSDVDKLFIQLVQTYNQLFEENPINASGVDAKAILSARLSKSRRLENLIAQLPGEKKNGLFGNLIALSLGLTPNFKSNFDLAEDAKLQLSKDTYDDDLDNLLAQIGDQYADLFLAAKNLSDAILLSDILRVNTEITKAPLSASMIKRYDEHHQDLTLLKALVRQQLPEKYKEIFFDQSKNGYAGYIDGGASQEEFYKFIKPILEKMDGTEELLVKLNREDLLRKQRTFDNGSIPHQIHLGELHAILRRQEDFYPFLKDNREKIEKILTFRIPYYVGPLARGNSRFAWMTRKSEETITPWNFEEVVDKGASAQSFIERMTNFDKNLPNEKVLPKHSLLYEYFTVYNELTKVKYVTEGMRKPAFLSGEQKKAIVDLLFKTNRKVTVKQLKEDYFKKIECFDSVEISGVEDRFNASLGTYHDLLKIIKDKDFLDNEENEDILEDIVLTLTLFEDREMIEERLKTYAHLFDDKVMKQLKRRRYTGWGRLSRKLINGIRDKQSGKTILDFLKSDGFANRNFMQLIHDDSLTFKEDIQKAQVSGQGDSLHEHIANLAGSPAIKKGILQTVKVVDELVKVMGRHKPENIVIEMARENQTTQKGQKNSRERMKRIEEGIKELGSQILKEHPVENTQLQNEKLYLYYLQNGRDMYVDQELDINRLSDYDVDAIVPQSFLKDDSIDNKVLTRSDKNRGKSDNVPSEEVVKKMKNYWRQLLNAKLITQRKFDNLTKAERGGLSELDKAGFIKRQLVETRQITKHVAQILDSRMNTKYDENDKLIREVKVITLKSKLVSDFRKDFQFYKVREINNYHHAHDAYLNAVVGTALIKKYPKLESEFVYGDYKVYDVRKMIAKSEQEIGKATAKYFFYSNIMNFFKTEITLANGEIRKRPLIETNGETGEIVWDKGRDFATVRKVLSMPQVNIVKKTEVQTGGFSKESILPKRNSDKLIARKKDWDPKKYGGFDSPTVAYSVLVVAKVEKGKSKKLKSVKELLGITIMERSSFEKNPIDFLEAKGYKEVKKDLIIKLPKYSLFELENGRKRMLASAGELQKGNELALPSKYVNFLYLASHYEKLKGSPEDNEQKQLFVEQHKHYLDEIIEQISEFSKRVILADANLDKVLSAYNKHRDKPIREQAENIIHLFTLTNLGAPAAFKYFDTTIDRKRYTSTKEVLDATLIHQSITGLYETRIDLSQLGGDSGGSSGGSSGSETPGTSESATPESSGGSSGGSSDKWKHKFELKENRWVYVPSEEMLKFPKKIHQYMRHKWKYPLYMYHLRDGGHVAAAKLHIKNDYFSLIDISDFFGSTSQSRVTDELKKLIPYAKAREIAKLSTVRIPNANGLKHAIPYGYPQSPILATLMFHNSYCGGVINTINKSGHVTVSVYMDDIILSSDDLAQLGQAFDTVCEALRKSRYEVNENKTQSPSTMINVFNLELSGNSLRVSPERMVQFQQAYVKSDNEHERKGIASYVHSVNPDQARLHFSGGSKRTADGSEFEPKKKRKV

SEQ ID NO: 1695 - protein, 1691 aa, synthetic construct
MKRTADGSEFESPKKKRKVDKKYSIGLDIGTNSVGWAVITDEYKVPSKKFKVLGNTDRHSIKKNLIGALLFDSGETAEATRLKRTARRRYTRRKNRICYLQEIFSNEMAKVDDSFFHRLEESFLVEEDKKHERHPIFGNIVDEVAYHEKYPTIYHLRKKLVDSTDKADLRLIYLALAHMIKFRGHFLIEGDLNPDNSDVDKLFIQLVQTYNQLFEENPINASGVDAKAILSARLSKSRRLENLIAQLPGEKKNGLFGNLIALSLGLTPNFKSNFDLAEDAKLQLSKDTYDDDLDNLLAQIGDQYADLFLAAKNLSDAILLSDILRVNTEITKAPLSASMIKRYDEHHQDLTLLKALVRQQLPEKYKEIFFDQSKNGYAGYIDGGASQEEFYKFIKPILEKMDGTEELLVKLNREDLLRKQRTFDNGSIPHQIHLGELHAILRRQEDFYPFLKDNREKIEKILTFRIPYYVGPLARGNSRFAWMTRKSEETITPWNFEEVVDKGASAQSFIERMTNFDKNLPNEKVLPKHSLLYEYFTVYNELTKVKYVTEGMRKPAFLSGEQKKAIVDLLFKTNRKVTVKQLKEDYFKKIECFDSVEISGVEDRFNASLGTYHDLLKIIKDKDFLDNEENEDILEDIVLTLTLFEDREMIEERLKTYAHLFDDKVMKQLKRRRYTGWGRLSRKLINGIRDKQSGKTILDFLKSDGFANRNFMQLIHDDSLTFKEDIQKAQVSGQGDSLHEHIANLAGSPAIKKGILQTVKVVDELVKVMGRHKPENIVIEMARENQTTQKGQKNSRERMKRIEEGIKELGSQILKEHPVENTQLQNEKLYLYYLQNGRDMYVDQELDINRLSDYDVDAIVPQSFLKDDSIDNKVLTRSDKNRGKSDNVPSEEVVKKMKNYWRQLLNAKLITQRKFDNLTKAERGGLSELDKAGFIKRQLVETRQITKHVAQILDSRMNTKYDENDKLIREVKVITLKSKLVSDFRKDFQFYKVREINNYHHAHDAYLNAVVGTALIKKYPKLESEFVYGDYKVYDVRKMIAKSEQEIGKATAKYFFYSNIMNFFKTEITLANGEIRKRPLIETNGETGEIVWDKGRDFATVRKVLSMPQVNIVKKTEVQTGGFSKESILPKRNSDKLIARKKDWDPKKYGGFDSPTVAYSVLVVAKVEKGKSKKLKSVKELLGITIMERSSFEKNPIDFLEAKGYKEVKKDLIIKLPKYSLFELENGRKRMLASAGELQKGNELALPSKYVNFLYLASHYEKLKGSPEDNEQKQLFVEQHKHYLDEIIEQISEFSKRVILADANLDKVLSAYNKHRDKPIREQAENIIHLFTLTNLGAPAAFKYFDTTIDRKRYTSTKEVLDATLIHQSITGLYETRIDLSQLGGDSGGSSGGSSGSETPGTSESATPESSGGSSGGSSDKWKHKFELKENTWVYVPSEEMLKFGKLIHQYWRHKWKYPLYMYHLRDGGHVAAAKLHIKNDYFSLIDISDFFGSTSQSRVTDELKKLIPYAKAREIAKLSTVRIPNANGLKHAIPYGYPQSPILATLMFENSYCGGVINTINKSGHVTVSVYMDDIILSSDDLAQLNQAFDTVPEALRKSRYEVNENKTQSPSTMINVFNLELSGNSLRVSPERMVQFIQAYVKSDNEHERKGIASYVHSVNPDQARLHFSGGSKRTADGSEFEPKKKRKV

SEQ ID NO: 1696 - protein, 1691 aa, synthetic construct
MKRTADGSEFESPKKKRKVDKKYSIGLDIGTNSVGWAVITDEYKVPSKKFKVLGNTDRHSIKKNLIGALLFDSGETAEATRLKRTARRRYTRRKNRICYLQEIFSNEMAKVDDSFFHRLEESFLVEEDKKHERHPIFGNIVDEVAYHEKYPTIYHLRKKLVDSTDKADLRLIYLALAHMIKFRGHFLIEGDLNPDNSDVDKLFIQLVQTYNQLFEENPINASGVDAKAILSARLSKSRRLENLIAQLPGEKKNGLFGNLIALSLGLTPNFKSNFDLAEDAKLQLSKDTYDDDLDNLLAQIGDQYADLFLAAKNLSDAILLSDILRVNTEITKAPLSASMIKRYDEHHQDLTLLKALVRQQLPEKYKEIFFDQSKNGYAGYIDGGASQEEFYKFIKPILEKMDGTEELLVKLNREDLLRKQRTFDNGSIPHQIHLGELHAILRRQEDFYPFLKDNREKIEKILTFRIPYYVGPLARGNSRFAWMTRKSEETITPWNFEEVVDKGASAQSFIERMTNFDKNLPNEKVLPKHSLLYEYFTVYNELTKVKYVTEGMRKPAFLSGEQKKAIVDLLFKTNRKVTVKQLKEDYFKKIECFDSVEISGVEDRFNASLGTYHDLLKIIKDKDFLDNEENEDILEDIVLTLTLFEDREMIEERLKTYAHLFDDKVMKQLKRRRYTGWGRLSRKLINGIRDKQSGKTILDFLKSDGFANRNFMQLIHDDSLTFKEDIQKAQVSGQGDSLHEHIANLAGSPAIKKGILQTVKVVDELVKVMGRHKPENIVIEMARENQTTQKGQKNSRERMKRIEEGIKELGSQILKEHPVENTQLQNEKLYLYYLQNGRDMYVDQELDINRLSDYDVDAIVPQSFLKDDSIDNKVLTRSDKNRGKSDNVPSEEVVKKMKNYWRQLLNAKLITQRKFDNLTKAERGGLSELDKAGFIKRQLVETRQITKHVAQILDSRMNTKYDENDKLIREVKVITLKSKLVSDFRKDFQFYKVREINNYHHAHDAYLNAVVGTALIKKYPKLESEFVYGDYKVYDVRKMIAKSEQEIGKATAKYFFYSNIMNFFKTEITLANGEIRKRPLIETNGETGEIVWDKGRDFATVRKVLSMPQVNIVKKTEVQTGGFSKESILPKRNSDKLIARKKDWDPKKYGGFDSPTVAYSVLVVAKVEKGKSKKLKSVKELLGITIMERSSFEKNPIDFLEAKGYKEVKKDLIIKLPKYSLFELENGRKRMLASAGELQKGNELALPSKYVNFLYLASHYEKLKGSPEDNEQKQLFVEQHKHYLDEIIEQISEFSKRVILADANLDKVLSAYNKHRDKPIREQAENIIHLFTLTNLGAPAAFKYFDTTIDRKRYTSTKEVLDATLIHQSITGLYETRIDLSQLGGDSGGSSGGSSGSETPGTSESATPESSGGSSGGSSDKWKHKFELKENRWVYVPSEEMLKFMKKIHQYIRHKWKYPLYMYHLRDGGHVAAAKLHIKNDYFSLIDISDFFGSTSQSRVTDELKKLIPYAKAREIAKLSTVRIPNANGLKHAIPYGYPQSPILATLMFHNSYCGGVINTINKSGHVTESVYMDDIILSSDDLAQLNQAFDTGCEALRKSRYEVNENGTQSPSTMINVFNLELSGNSLRVSPERMVQFIQAYVKSDNEHERKGIASYVHSVNPDQARLHFSGGSKRTADGSEFEPKKKRKV

SEQ ID NO: 1697 - protein, 1691 aa, synthetic construct
MKRTADGSEFESPKKKRKVDKKYSIGLDIGTNSVGWAVITDEYKVPSKKFKVLGNTDRHSIKKNLIGALLFDSGETAEATRLKRTARRRYTRRKNRICYLQEIFSNEMAKVDDSFFHRLEESFLVEEDKKHERHPIFGNIVDEVAYHEKYPTIYHLRKKLVDSTDKADLRLIYLALAHMIKFRGHFLIEGDLNPDNSDVDKLFIQLVQTYNQLFEENPINASGVDAKAILSARLSKSRRLENLIAQLPGEKKNGLFGNLIALSLGLTPNFKSNFDLAEDAKLQLSKDTYDDDLDNLLAQIGDQYADLFLAAKNLSDAILLSDILRVNTEITKAPLSASMIKRYDEHHQDLTLLKALVRQQLPEKYKEIFFDQSKNGYAGYIDGGASQEEFYKFIKPILEKMDGTEELLVKLNREDLLRKQRTFDNGSIPHQIHLGELHAILRRQEDFYPFLKDNREKIEKILTFRIPYYVGPLARGNSRFAWMTRKSEETITPWNFEEVVDKGASAQSFIERMTNFDKNLPNEKVLPKHSLLYEYFTVYNELTKVKYVTEGMRKPAFLSGEQKKAIVDLLFKTNRKVTVKQLKEDYFKKIECFDSVEISGVEDRFNASLGTYHDLLKIIKDKDFLDNEENEDILEDIVLTLTLFEDREMIEERLKTYAHLFDDKVMKQLKRRRYTGWGRLSRKLINGIRDKQSGKTILDFLKSDGFANRNFMQLIHDDSLTFKEDIQKAQVSGQGDSLHEHIANLAGSPAIKKGILQTVKVVDELVKVMGRHKPENIVIEMARENQTTQKGQKNSRERMKRIEEGIKELGSQILKEHPVENTQLQNEKLYLYYLQNGRDMYVDQELDINRLSDYDVDAIVPQSFLKDDSIDNKVLTRSDKNRGKSDNVPSEEVVKKMKNYWRQLLNAKLITQRKFDNLTKAERGGLSELDKAGFIKRQLVETRQITKHVAQILDSRMNTKYDENDKLIREVKVITLKSKLVSDFRKDFQFYKVREINNYHHAHDAYLNAVVGTALIKKYPKLESEFVYGDYKVYDVRKMIAKSEQEIGKATAKYFFYSNIMNFFKTEITLANGEIRKRPLIETNGETGEIVWDKGRDFATVRKVLSMPQVNIVKKTEVQTGGFSKESILPKRNSDKLIARKKDWDPKKYGGFDSPTVAYSVLVVAKVEKGKSKKLKSVKELLGITIMERSSFEKNPIDFLEAKGYKEVKKDLIIKLPKYSLFELENGRKRMLASAGELQKGNELALPSKYVNFLYLASHYEKLKGSPEDNEQKQLFVEQHKHYLDEIIEQISEFSKRVILADANLDKVLSAYNKHRDKPIREQAENIIHLFTLTNLGAPAAFKYFDTTIDRKRYTSTKEVLDATLIHQSITGLYETRIDLSQLGGDSGGSSGGSSGSETPGTSESATPESSGGSSGGSSDKWKHKFELKENRWVYVPSEEMLKFIKEIHQYIRHKWKYPLYMYHLRDGGHVAAAKLHIKNDYFSLIDISDFFGSTSQSRVTDELKKLIPYAKAREIAKLSTVRIPNANGLKHAIPYGYPQSPILATLMFHNSYCGGVINTINKSGHVTVSVYMDDIILSSDDLAQLNNAFDTVCEALRKSRYEVNENKTQSPSTMINVFNLELSGNSLRVSPERMVQFIQAYVKSDNEHERKGIASYVHSVNMDQARLHFSGGSKRTADGSEFEPKKKRKV

SEQ ID NO: 1698 - protein, 1691 aa, synthetic construct
MKRTADGSEFESPKKKRKVDKKYSIGLDIGTNSVGWAVITDEYKVPSKKFKVLGNTDRHSIKKNLIGALLFDSGETAEATRLKRTARRRYTRRKNRICYLQEIFSNEMAKVDDSFFHRLEESFLVEEDKKHERHPIFGNIVDEVAYHEKYPTIYHLRKKLVDSTDKADLRLIYLALAHMIKFRGHFLIEGDLNPDNSDVDKLFIQLVQTYNQLFEENPINASGVDAKAILSARLSKSRRLENLIAQLPGEKKNGLFGNLIALSLGLTPNFKSNFDLAEDAKLQLSKDTYDDDLDNLLAQIGDQYADLFLAAKNLSDAILLSDILRVNTEITKAPLSASMIKRYDEHHQDLTLLKALVRQQLPEKYKEIFFDQSKNGYAGYIDGGASQEEFYKFIKPILEKMDGTEELLVKLNREDLLRKQRTFDNGSIPHQIHLGELHAILRRQEDFYPFLKDNREKIEKILTFRIPYYVGPLARGNSRFAWMTRKSEETITPWNFEEVVDKGASAQSFIERMTNFDKNLPNEKVLPKHSLLYEYFTVYNELTKVKYVTEGMRKPAFLSGEQKKAIVDLLFKTNRKVTVKQLKEDYFKKIECFDSVEISGVEDRFNASLGTYHDLLKIIKDKDFLDNEENEDILEDIVLTLTLFEDREMIEERLKTYAHLFDDKVMKQLKRRRYTGWGRLSRKLINGIRDKQSGKTILDFLKSDGFANRNFMQLIHDDSLTFKEDIQKAQVSGQGDSLHEHIANLAGSPAIKKGILQTVKVVDELVKVMGRHKPENIVIEMARENQTTQKGQKNSRERMKRIEEGIKELGSQILKEHPVENTQLQNEKLYLYYLQNGRDMYVDQELDINRLSDYDVDAIVPQSFLKDDSIDNKVLTRSDKNRGKSDNVPSEEVVKKMKNYWRQLLNAKLITQRKFDNLTKAERGGLSELDKAGFIKRQLVETRQITKHVAQILDSRMNTKYDENDKLIREVKVITLKSKLVSDFRKDFQFYKVREINNYHHAHDAYLNAVVGTALIKKYPKLESEFVYGDYKVYDVRKMIAKSEQEIGKATAKYFFYSNIMNFFKTEITLANGEIRKRPLIETNGETGEIVWDKGRDFATVRKVLSMPQVNIVKKTEVQTGGFSKESILPKRNSDKLIARKKDWDPKKYGGFDSPTVAYSVLVVAKVEKGKSKKLKSVKELLGITIMERSSFEKNPIDFLEAKGYKEVKKDLIIKLPKYSLFELENGRKRMLASAGELQKGNELALPSKYVNFLYLASHYEKLKGSPEDNEQKQLFVEQHKHYLDEIIEQISEFSKRVILADANLDKVLSAYNKHRDKPIREQAENIIHLFTLTNLGAPAAFKYFDTTIDRKRYTSTKEVLDATLIHQSITGLYETRIDLSQLGGDSGGSSGGSSGSETPGTSESATPESSGGSSGGSSDKWKHKFELKENRRVYVPSEEMLKFGKKIHQYIRHKWKYPLYMYHLRDGGHVAAAKLHIKNDYFSLIDISDFFGSTSQSRVTDELKKLIPYAKAREIAKLSTVRIPNANGLKHARPYGYPQSPILATLMFHNSYCGGVINTINKSGHVTVSVYMDDIILSSDDLAQNNQAFDTVCEALRKSRYEVNETKTQSPSTMINVFNLELSGNSLRVSPERMVQFIQAYVKSDNEHERKGIASYVHSVNPDQARLHFSGGSKRTADGSEFEPKKKRKV

SEQ ID NO: 1699 - protein, 1691 aa, synthetic construct
MKRTADGSEFESPKKKRKVDKKYSIGLDIGTNSVGWAVITDEYKVPSKKFKVLGNTDRHSIKKNLIGALLFDSGETAEATRLKRTARRRYTRRKNRICYLQEIFSNEMAKVDDSFFHRLEESFLVEEDKKHERHPIFGNIVDEVAYHEKYPTIYHLRKKLVDSTDKADLRLIYLALAHMIKFRGHFLIEGDLNPDNSDVDKLFIQLVQTYNQLFEENPINASGVDAKAILSARLSKSRRLENLIAQLPGEKKNGLFGNLIALSLGLTPNFKSNFDLAEDAKLQLSKDTYDDDLDNLLAQIGDQYADLFLAAKNLSDAILLSDILRVNTEITKAPLSASMIKRYDEHHQDLTLLKALVRQQLPEKYKEIFFDQSKNGYAGYIDGGASQEEFYKFIKPILEKMDGTEELLVKLNREDLLRKQRTFDNGSIPHQIHLGELHAILRRQEDFYPFLKDNREKIEKILTFRIPYYVGPLARGNSRFAWMTRKSEETITPWNFEEVVDKGASAQSFIERMTNFDKNLPNEKVLPKHSLLYEYFTVYNELTKVKYVTEGMRKPAFLSGEQKKAIVDLLFKTNRKVTVKQLKEDYFKKIECFDSVEISGVEDRFNASLGTYHDLLKIIKDKDFLDNEENEDILEDIVLTLTLFEDREMIEERLKTYAHLFDDKVMKQLKRRRYTGWGRLSRKLINGIRDKQSGKTILDFLKSDGFANRNFMQLIHDDSLTFKEDIQKAQVSGQGDSLHEHIANLAGSPAIKKGILQTVKVVDELVKVMGRHKPENIVIEMARENQTTQKGQKNSRERMKRIEEGIKELGSQILKEHPVENTQLQNEKLYLYYLQNGRDMYVDQELDINRLSDYDVDAIVPQSFLKDDSIDNKVLTRSDKNRGKSDNVPSEEVVKKMKNYWRQLLNAKLITQRKFDNLTKAERGGLSELDKAGFIKRQLVETRQITKHVAQILDSRMNTKYDENDKLIREVKVITLKSKLVSDFRKDFQFYKVREINNYHHAHDAYLNAVVGTALIKKYPKLESEFVYGDYKVYDVRKMIAKSEQEIGKATAKYFFYSNIMNFFKTEITLANGEIRKRPLIETNGETGEIVWDKGRDFATVRKVLSMPQVNIVKKTEVQTGGFSKESILPKRNSDKLIARKKDWDPKKYGGFDSPTVAYSVLVVAKVEKGKSKKLKSVKELLGITIMERSSFEKNPIDFLEAKGYKEVKKDLIIKLPKYSLFELENGRKRMLASAGELQKGNELALPSKYVNFLYLASHYEKLKGSPEDNEQKQLFVEQHKHYLDEIIEQISEFSKRVILADANLDKVLSAYNKHRDKPIREQAENIIHLFTLTNLGAPAAFKYFDTTIDRKRYTSTKEVLDATLIHQSITGLYETRIDLSQLGGDSGGSSGGSSGSETPGTSESATPESSGGSSGGSSDKWKHKFELKENRWVYVPSEEMLKFGKKIHQYIRHKWKYPLYMYHLRDGGHVAAAKLHIKNDYFSLIDISDFFGSTSQSRVTDELKKLIPYAKAREIAKLSTVRIPNANGLKHAIPYGYPQSPILATLMFHNSYCGGVLNTINKSAHVTVSVYMDDIILCSDDLAQLNQAFDTVCEALRKSRYYVNENKTQSPSTMINVFNLELSGNSLRVSPERMVQFIQAYVKSDNEHERWGIASYVHSVNPDQARLHFSGGSKRTADGSEFEPKKKRKV

SEQ ID NO: 1700 - protein, 1691 aa, synthetic construct
MKRTADGSEFESPKKKRKVDKKYSIGLDIGTNSVGWAVITDEYKVPSKKFKVLGNTDRHSIKKNLIGALLFDSGETAEATRLKRTARRRYTRRKNRICYLQEIFSNEMAKVDDSFFHRLEESFLVEEDKKHERHPIFGNIVDEVAYHEKYPTIYHLRKKLVDSTDKADLRLIYLALAHMIKFRGHFLIEGDLNPDNSDVDKLFIQLVQTYNQLFEENPINASGVDAKAILSARLSKSRRLENLIAQLPGEKKNGLFGNLIALSLGLTPNFKSNFDLAEDAKLQLSKDTYDDDLDNLLAQIGDQYADLFLAAKNLSDAILLSDILRVNTEITKAPLSASMIKRYDEHHQDLTLLKALVRQQLPEKYKEIFFDQSKNGYAGYIDGGASQEEFYKFIKPILEKMDGTEELLVKLNREDLLRKQRTFDNGSIPHQIHLGELHAILRRQEDFYPFLKDNREKIEKILTFRIPYYVGPLARGNSRFAWMTRKSEETITPWNFEEVVDKGASAQSFIERMTNFDKNLPNEKVLPKHSLLYEYFTVYNELTKVKYVTEGMRKPAFLSGEQKKAIVDLLFKTNRKVTVKQLKEDYFKKIECFDSVEISGVEDRFNASLGTYHDLLKIIKDKDFLDNEENEDILEDIVLTLTLFEDREMIEERLKTYAHLFDDKVMKQLKRRRYTGWGRLSRKLINGIRDKQSGKTILDFLKSDGFANRNFMQLIHDDSLTFKEDIQKAQVSGQGDSLHEHIANLAGSPAIKKGILQTVKVVDELVKVMGRHKPENIVIEMARENQTTQKGQKNSRERMKRIEEGIKELGSQILKEHPVENTQLQNEKLYLYYLQNGRDMYVDQELDINRLSDYDVDAIVPQSFLKDDSIDNKVLTRSDKNRGKSDNVPSEEVVKKMKNYWRQLLNAKLITQRKFDNLTKAERGGLSELDKAGFIKRQLVETRQITKHVAQILDSRMNTKYDENDKLIREVKVITLKSKLVSDFRKDFQFYKVREINNYHHAHDAYLNAVVGTALIKKYPKLESEFVYGDYKVYDVRKMIAKSEQEIGKATAKYFFYSNIMNFFKTEITLANGEIRKRPLIETNGETGEIVWDKGRDFATVRKVLSMPQVNIVKKTEVQTGGFSKESILPKRNSDKLIARKKDWDPKKYGGFDSPTVAYSVLVVAKVEKGKSKKLKSVKELLGITIMERSSFEKNPIDFLEAKGYKEVKKDLIIKLPKYSLFELENGRKRMLASAGELQKGNELALPSKYVNFLYLASHYEKLKGSPEDNEQKQLFVEQHKHYLDEIIEQISEFSKRVILADANLDKVLSAYNKHRDKPIREQAENIIHLFTLTNLGAPAAFKYFDTTIDRKRYTSTKEVLDATLIHQSITGLYETRIDLSQLGGDSGGSSGGSSGSETPGTSESATPESSGGSSGGSSDKWKHKFELKENRWVYVPSEEMLKFGKKIHQYIRHKWKYPLYMYHLRDGGHVAAAKLHIKNDYFSLIDISDFFGSTSQSRVTDELKKLIPYAKAREIAKLSTVRIPNANGLKHAIPYGYPQSPILATLMFHNSYCGGVINTINKSGHVTVSVYMDDIILSSDDLAQLNQAFDTVCEALRKSRYEVNENKTQSPSTMINVFNLELSHNSLRVSPERMVQFIQAYVKSDNEHERKGIASYVHSVNPDQARLHFSGGSKRTADGSEFEPKKKRKV

SEQ ID NO: 1701 - protein, 1691 aa, synthetic construct
MKRTADGSEFESPKKKRKVDKKYSIGLDIGTNSVGWAVITDEYKVPSKKFKVLGNTDRHSIKKNLIGALLFDSGETAEATRLKRTARRRYTRRKNRICYLQEIFSNEMAKVDDSFFHRLEESFLVEEDKKHERHPIFGNIVDEVAYHEKYPTIYHLRKKLVDSTDKADLRLIYLALAHMIKFRGHFLIEGDLNPDNSDVDKLFIQLVQTYNQLFEENPINASGVDAKAILSARLSKSRRLENLIAQLPGEKKNGLFGNLIALSLGLTPNFKSNFDLAEDAKLQLSKDTYDDDLDNLLAQIGDQYADLFLAAKNLSDAILLSDILRVNTEITKAPLSASMIKRYDEHHQDLTLLKALVRQQLPEKYKEIFFDQSKNGYAGYIDGGASQEEFYKFIKPILEKMDGTEELLVKLNREDLLRKQRTFDNGSIPHQIHLGELHAILRRQEDFYPFLKDNREKIEKILTFRIPYYVGPLARGNSRFAWMTRKSEETITPWNFEEVVDKGASAQSFIERMTNFDKNLPNEKVLPKHSLLYEYFTVYNELTKVKYVTEGMRKPAFLSGEQKKAIVDLLFKTNRKVTVKQLKEDYFKKIECFDSVEISGVEDRFNASLGTYHDLLKIIKDKDFLDNEENEDILEDIVLTLTLFEDREMIEERLKTYAHLFDDKVMKQLKRRRYTGWGRLSRKLINGIRDKQSGKTILDFLKSDGFANRNFMQLIHDDSLTFKEDIQKAQVSGQGDSLHEHIANLAGSPAIKKGILQTVKVVDELVKVMGRHKPENIVIEMARENQTTQKGQKNSRERMKRIEEGIKELGSQILKEHPVENTQLQNEKLYLYYLQNGRDMYVDQELDINRLSDYDVDAIVPQSFLKDDSIDNKVLTRSDKNRGKSDNVPSEEVVKKMKNYWRQLLNAKLITQRKFDNLTKAERGGLSELDKAGFIKRQLVETRQITKHVAQILDSRMNTKYDENDKLIREVKVITLKSKLVSDFRKDFQFYKVREINNYHHAHDAYLNAVVGTALIKKYPKLESEFVYGDYKVYDVRKMIAKSEQEIGKATAKYFFYSNIMNFFKTEITLANGEIRKRPLIETNGETGEIVWDKGRDFATVRKVLSMPQVNIVKKTEVQTGGFSKESILPKRNSDKLIARKKDWDPKKYGGFDSPTVAYSVLVVAKVEKGKSKKLKSVKELLGITIMERSSFEKNPIDFLEAKGYKEVKKDLIIKLPKYSLFELENGRKRMLASAGELQKGNELALPSKYVNFLYLASHYEKLKGSPEDNEQKQLFVEQHKHYLDEIIEQISEFSKRVILADANLDKVLSAYNKHRDKPIREQAENIIHLFTLTNLGAPAAFKYFDTTIDRKRYTSTKEVLDATLIHQSITGLYETRIDLSQLGGDSGGSSGGSSGSETPGTSESATPESSGGSSGGSSDKWKHKFELKENRWVYVPSEEMLKFGKKIHQYIRHKWKYPLYMYHLRDGGHVAAAKLHIKNDYFSLIDISDFFGSTSQSRVTDELKKLIPYAKAREIAKLSTVRIPNANGLKHAIPYGYPQSPILATLLFHNSYCGGVINTINKSGHVTVSVYMDDIILSSDDLAQLNQAFDTVCEALRKSRYEVNENKTQSPSTMINVFNLELSHNSLRVSPERMVQFIQAYVKSDNEHERKGIASYVHSVNPDQARLHFSGGSKRTADGSEFEPKKKRKV

SEQ ID NO: 1702 - protein, 1691 aa, synthetic construct
MKRTADGSEFESPKKKRKVDKKYSIGLDIGTNSVGWAVITDEYKVPSKKFKVLGNTDRHSIKKNLIGALLFDSGETAEATRLKRTARRRYTRRKNRICYLQEIFSNEMAKVDDSFFHRLEESFLVEEDKKHERHPIFGNIVDEVAYHEKYPTIYHLRKKLVDSTDKADLRLIYLALAHMIKFRGHFLIEGDLNPDNSDVDKLFIQLVQTYNQLFEENPINASGVDAKAILSARLSKSRRLENLIAQLPGEKKNGLFGNLIALSLGLTPNFKSNFDLAEDAKLQLSKDTYDDDLDNLLAQIGDQYADLFLAAKNLSDAILLSDILRVNTEITKAPLSASMIKRYDEHHQDLTLLKALVRQQLPEKYKEIFFDQSKNGYAGYIDGGASQEEFYKFIKPILEKMDGTEELLVKLNREDLLRKQRTFDNGSIPHQIHLGELHAILRRQEDFYPFLKDNREKIEKILTFRIPYYVGPLARGNSRFAWMTRKSEETITPWNFEEVVDKGASAQSFIERMTNFDKNLPNEKVLPKHSLLYEYFTVYNELTKVKYVTEGMRKPAFLSGEQKKAIVDLLFKTNRKVTVKQLKEDYFKKIECFDSVEISGVEDRFNASLGTYHDLLKIIKDKDFLDNEENEDILEDIVLTLTLFEDREMIEERLKTYAHLFDDKVMKQLKRRRYTGWGRLSRKLINGIRDKQSGKTILDFLKSDGFANRNFMQLIHDDSLTFKEDIQKAQVSGQGDSLHEHIANLAGSPAIKKGILQTVKVVDELVKVMGRHKPENIVIEMARENQTTQKGQKNSRERMKRIEEGIKELGSQILKEHPVENTQLQNEKLYLYYLQNGRDMYVDQELDINRLSDYDVDAIVPQSFLKDDSIDNKVLTRSDKNRGKSDNVPSEEVVKKMKNYWRQLLNAKLITQRKFDNLTKAERGGLSELDKAGFIKRQLVETRQITKHVAQILDSRMNTKYDENDKLIREVKVITLKSKLVSDFRKDFQFYKVREINNYHHAHDAYLNAVVGTALIKKYPKLESEFVYGDYKVYDVRKMIAKSEQEIGKATAKYFFYSNIMNFFKTEITLANGEIRKRPLIETNGETGEIVWDKGRDFATVRKVLSMPQVNIVKKTEVQTGGFSKESILPKRNSDKLIARKKDWDPKKYGGFDSPTVAYSVLVVAKVEKGKSKKLKSVKELLGITIMERSSFEKNPIDFLEAKGYKEVKKDLIIKLPKYSLFELENGRKRMLASAGELQKGNELALPSKYVNFLYLASHYEKLKGSPEDNEQKQLFVEQHKHYLDEIIEQISEFSKRVILADANLDKVLSAYNKHRDKPIREQAENIIHLFTLTNLGAPAAFKYFDTTIDRKRYTSTKEVLDATLIHQSITGLYETRIDLSQLGGDSGGSSGGSSGSETPGTSESATPESSGGSSGGSSDKWKHKFELKENRWVYVPSEEMLKFGKKIHQYIRHKWKYPLYMYHLRDGGHVAAAKLHIKNDYFSLIDISDFFGSTSQSRVTEELKKLIPYAKAREIAKLSTVRIPNANGLKHAIPYGYPQSPILATLMFHNSYCGGVINTINKSGHVTVSVYMDDIILSSDDLAQLNQAFDTVCEALRKSRYEVNENKTQSPSTMINVFNLELSHNSLRVSPERMVQFIQAYVKSDNEHERKGIASYVHSVNPDQARLHFSGGSKRTADGSEFEPKKKRKV

SEQ ID NO: 1703 - protein, 1691 aa, synthetic construct
MKRTADGSEFESPKKKRKVDKKYSIGLDIGTNSVGWAVITDEYKVPSKKFKVLGNTDRHSIKKNLIGALLFDSGETAEATRLKRTARRRYTRRKNRICYLQEIFSNEMAKVDDSFFHRLEESFLVEEDKKHERHPIFGNIVDEVAYHEKYPTIYHLRKKLVDSTDKADLRLIYLALAHMIKFRGHFLIEGDLNPDNSDVDKLFIQLVQTYNQLFEENPINASGVDAKAILSARLSKSRRLENLIAQLPGEKKNGLFGNLIALSLGLTPNFKSNFDLAEDAKLQLSKDTYDDDLDNLLAQIGDQYADLFLAAKNLSDAILLSDILRVNTEITKAPLSASMIKRYDEHHQDLTLLKALVRQQLPEKYKEIFFDQSKNGYAGYIDGGASQEEFYKFIKPILEKMDGTEELLVKLNREDLLRKQRTFDNGSIPHQIHLGELHAILRRQEDFYPFLKDNREKIEKILTFRIPYYVGPLARGNSRFAWMTRKSEETITPWNFEEVVDKGASAQSFIERMTNFDKNLPNEKVLPKHSLLYEYFTVYNELTKVKYVTEGMRKPAFLSGEQKKAIVDLLFKTNRKVTVKQLKEDYFKKIECFDSVEISGVEDRFNASLGTYHDLLKIIKDKDFLDNEENEDILEDIVLTLTLFEDREMIEERLKTYAHLFDDKVMKQLKRRRYTGWGRLSRKLINGIRDKQSGKTILDFLKSDGFANRNFMQLIHDDSLTFKEDIQKAQVSGQGDSLHEHIANLAGSPAIKKGILQTVKVVDELVKVMGRHKPENIVIEMARENQTTQKGQKNSRERMKRIEEGIKELGSQILKEHPVENTQLQNEKLYLYYLQNGRDMYVDQELDINRLSDYDVDAIVPQSFLKDDSIDNKVLTRSDKNRGKSDNVPSEEVVKKMKNYWRQLLNAKLITQRKFDNLTKAERGGLSELDKAGFIKRQLVETRQITKHVAQILDSRMNTKYDENDKLIREVKVITLKSKLVSDFRKDFQFYKVREINNYHHAHDAYLNAVVGTALIKKYPKLESEFVYGDYKVYDVRKMIAKSEQEIGKATAKYFFYSNIMNFFKTEITLANGEIRKRPLIETNGETGEIVWDKGRDFATVRKVLSMPQVNIVKKTEVQTGGFSKESILPKRNSDKLIARKKDWDPKKYGGFDSPTVAYSVLVVAKVEKGKSKKLKSVKELLGITIMERSSFEKNPIDFLEAKGYKEVKKDLIIKLPKYSLFELENGRKRMLASAGELQKGNELALPSKYVNFLYLASHYEKLKGSPEDNEQKQLFVEQHKHYLDEIIEQISEFSKRVILADANLDKVLSAYNKHRDKPIREQAENIIHLFTLTNLGAPAAFKYFDTTIDRKRYTSTKEVLDATLIHQSITGLYETRIDLSQLGGDSGGSSGGSSGSETPGTSESATPESSGGSSGGSSDKWKHKFELKENRWVYVPSEEMLKFGKKIHQYIRHKWKYPLYMYHLRDGGHVAAAKLHIKNDYFSLIDISDFFGSTSQSRVTEELKKLIPYAKAREIAKLSTVRIPNANGLKHAIPYGYPQSPILATLLFHNSYCGGVINTINKSGHVTVSVYMDDIILSSDDLAQLNQAFDTVCEALRKSRYEVNENKTQSPSTMINVFNLELSHNSLRVSPERMVQFIQAYVKSDNEHERKGIASYVHSVNPDQARLHFSGGSKRTADGSEFEPKKKRKV

SEQ ID NO: 1704 - protein, 1691 aa, synthetic construct
MKRTADGSEFESPKKKRKVDKKYSIGLDIGTNSVGWAVITDEYKVPSKKFKVLGNTDRHSIKKNLIGALLFDSGETAEATRLKRTARRRYTRRKNRICYLQEIFSNEMAKVDDSFFHRLEESFLVEEDKKHERHPIFGNIVDEVAYHEKYPTIYHLRKKLVDSTDKADLRLIYLALAHMIKFRGHFLIEGDLNPDNSDVDKLFIQLVQTYNQLFEENPINASGVDAKAILSARLSKSRRLENLIAQLPGEKKNGLFGNLIALSLGLTPNFKSNFDLAEDAKLQLSKDTYDDDLDNLLAQIGDQYADLFLAAKNLSDAILLSDILRVNTEITKAPLSASMIKRYDEHHQDLTLLKALVRQQLPEKYKEIFFDQSKNGYAGYIDGGASQEEFYKFIKPILEKMDGTEELLVKLNREDLLRKQRTFDNGSIPHQIHLGELHAILRRQEDFYPFLKDNREKIEKILTFRIPYYVGPLARGNSRFAWMTRKSEETITPWNFEEVVDKGASAQSFIERMTNFDKNLPNEKVLPKHSLLYEYFTVYNELTKVKYVTEGMRKPAFLSGEQKKAIVDLLFKTNRKVTVKQLKEDYFKKIECFDSVEISGVEDRFNASLGTYHDLLKIIKDKDFLDNEENEDILEDIVLTLTLFEDREMIEERLKTYAHLFDDKVMKQLKRRRYTGWGRLSRKLINGIRDKQSGKTILDFLKSDGFANRNFMQLIHDDSLTFKEDIQKAQVSGQGDSLHEHIANLAGSPAIKKGILQTVKVVDELVKVMGRHKPENIVIEMARENQTTQKGQKNSRERMKRIEEGIKELGSQILKEHPVENTQLQNEKLYLYYLQNGRDMYVDQELDINRLSDYDVDAIVPQSFLKDDSIDNKVLTRSDKNRGKSDNVPSEEVVKKMKNYWRQLLNAKLITQRKFDNLTKAERGGLSELDKAGFIKRQLVETRQITKHVAQILDSRMNTKYDENDKLIREVKVITLKSKLVSDFRKDFQFYKVREINNYHHAHDAYLNAVVGTALIKKYPKLESEFVYGDYKVYDVRKMIAKSEQEIGKATAKYFFYSNIMNFFKTEITLANGEIRKRPLIETNGETGEIVWDKGRDFATVRKVLSMPQVNIVKKTEVQTGGFSKESILPKRNSDKLIARKKDWDPKKYGGFDSPTVAYSVLVVAKVEKGKSKKLKSVKELLGITIMERSSFEKNPIDFLEAKGYKEVKKDLIIKLPKYSLFELENGRKRMLASAGELQKGNELALPSKYVNFLYLASHYEKLKGSPEDNEQKQLFVEQHKHYLDEIIEQISEFSKRVILADANLDKVLSAYNKHRDKPIREQAENIIHLFTLTNLGAPAAFKYFDTTIDRKRYTSTKEVLDATLIHQSITGLYETRIDLSQLGGDSGGSSGGSSGSETPGTSESATPESSGGSSGGSSDKWKHKFELKENRWVYVPSEEMLKFGKKIHQYIRHKWKYPLYMYHLRDGGHVAAAKLHIKNDYFSLIDISDFFGSTSQSRVTRELKKLIPYAKAREIAKLSTVRIPNANGLKHAIPYGYPQSPILATLCFHNSYCGGVINTINKSGHVTVSVYMDDIILSSDDLAQLNQAFDTVCEALRKSRYEVNENKTQSPSTMINVFNLELSGNSLRVSPERMVQFIQAYVKSDNEHERKGIASYVHSVNPDQARLHFSGGSKRTADGSEFEPKKKRKV

SEQ ID NO: 1705 - protein, 1691 aa, synthetic construct
MKRTADGSEFESPKKKRKVDKKYSIGLDIGTNSVGWAVITDEYKVPSKKFKVLGNTDRHSIKKNLIGALLFDSGETAEATRLKRTARRRYTRRKNRICYLQEIFSNEMAKVDDSFFHRLEESFLVEEDKKHERHPIFGNIVDEVAYHEKYPTIYHLRKKLVDSTDKADLRLIYLALAHMIKFRGHFLIEGDLNPDNSDVDKLFIQLVQTYNQLFEENPINASGVDAKAILSARLSKSRRLENLIAQLPGEKKNGLFGNLIALSLGLTPNFKSNFDLAEDAKLQLSKDTYDDDLDNLLAQIGDQYADLFLAAKNLSDAILLSDILRVNTEITKAPLSASMIKRYDEHHQDLTLLKALVRQQLPEKYKEIFFDQSKNGYAGYIDGGASQEEFYKFIKPILEKMDGTEELLVKLNREDLLRKQRTFDNGSIPHQIHLGELHAILRRQEDFYPFLKDNREKIEKILTFRIPYYVGPLARGNSRFAWMTRKSEETITPWNFEEVVDKGASAQSFIERMTNFDKNLPNEKVLPKHSLLYEYFTVYNELTKVKYVTEGMRKPAFLSGEQKKAIVDLLFKTNRKVTVKQLKEDYFKKIECFDSVEISGVEDRFNASLGTYHDLLKIIKDKDFLDNEENEDILEDIVLTLTLFEDREMIEERLKTYAHLFDDKVMKQLKRRRYTGWGRLSRKLINGIRDKQSGKTILDFLKSDGFANRNFMQLIHDDSLTFKEDIQKAQVSGQGDSLHEHIANLAGSPAIKKGILQTVKVVDELVKVMGRHKPENIVIEMARENQTTQKGQKNSRERMKRIEEGIKELGSQILKEHPVENTQLQNEKLYLYYLQNGRDMYVDQELDINRLSDYDVDAIVPQSFLKDDSIDNKVLTRSDKNRGKSDNVPSEEVVKKMKNYWRQLLNAKLITQRKFDNLTKAERGGLSELDKAGFIKRQLVETRQITKHVAQILDSRMNTKYDENDKLIREVKVITLKSKLVSDFRKDFQFYKVREINNYHHAHDAYLNAVVGTALIKKYPKLESEFVYGDYKVYDVRKMIAKSEQEIGKATAKYFFYSNIMNFFKTEITLANGEIRKRPLIETNGETGEIVWDKGRDFATVRKVLSMPQVNIVKKTEVQTGGFSKESILPKRNSDKLIARKKDWDPKKYGGFDSPTVAYSVLVVAKVEKGKSKKLKSVKELLGITIMERSSFEKNPIDFLEAKGYKEVKKDLIIKLPKYSLFELENGRKRMLASAGELQKGNELALPSKYVNFLYLASHYEKLKGSPEDNEQKQLFVEQHKHYLDEIIEQISEFSKRVILADANLDKVLSAYNKHRDKPIREQAENIIHLFTLTNLGAPAAFKYFDTTIDRKRYTSTKEVLDATLIHQSITGLYETRIDLSQLGGDSGGSSGGSSGSETPGTSESATPESSGGSSGGSSDKWKHKFELKENRWVYVPSEEMLKFGKKIHQYIRHKWKYPLYMYHLRDGGHVAAAKLHIKNDYFSLIDISDFFGSTSQSRVTDELKKLIPYAKAREIAKLSTVRIPNANGLKHAIPYGYPQSPILATLMFHNSYCGGVINTINKSGHVTVSVYMDDIILSSDDLAQLNQAFDTVCEALRKSRYEVNENKTQSPSTMINVFNLELSGNSLRVSPERMVQFIQAYVKSDNEHERKGIASYVHSVNPDQARLHFSGGSKRTADGSEFEPKKKRKV

SEQ ID NO: 1706 - protein, 1691 aa, synthetic construct
MKRTADGSEFESPKKKRKVDKKYSIGLDIGTNSVGWAVITDEYKVPSKKFKVLGNTDRHSIKKNLIGALLFDSGETAEATRLKRTARRRYTRRKNRICYLQEIFSNEMAKVDDSFFHRLEESFLVEEDKKHERHPIFGNIVDEVAYHEKYPTIYHLRKKLVDSTDKADLRLIYLALAHMIKFRGHFLIEGDLNPDNSDVDKLFIQLVQTYNQLFEENPINASGVDAKAILSARLSKSRRLENLIAQLPGEKKNGLFGNLIALSLGLTPNFKSNFDLAEDAKLQLSKDTYDDDLDNLLAQIGDQYADLFLAAKNLSDAILLSDILRVNTEITKAPLSASMIKRYDEHHQDLTLLKALVRQQLPEKYKEIFFDQSKNGYAGYIDGGASQEEFYKFIKPILEKMDGTEELLVKLNREDLLRKQRTFDNGSIPHQIHLGELHAILRRQEDFYPFLKDNREKIEKILTFRIPYYVGPLARGNSRFAWMTRKSEETITPWNFEEVVDKGASAQSFIERMTNFDKNLPNEKVLPKHSLLYEYFTVYNELTKVKYVTEGMRKPAFLSGEQKKAIVDLLFKTNRKVTVKQLKEDYFKKIECFDSVEISGVEDRFNASLGTYHDLLKIIKDKDFLDNEENEDILEDIVLTLTLFEDREMIEERLKTYAHLFDDKVMKQLKRRRYTGWGRLSRKLINGIRDKQSGKTILDFLKSDGFANRNFMQLIHDDSLTFKEDIQKAQVSGQGDSLHEHIANLAGSPAIKKGILQTVKVVDELVKVMGRHKPENIVIEMARENQTTQKGQKNSRERMKRIEEGIKELGSQILKEHPVENTQLQNEKLYLYYLQNGRDMYVDQELDINRLSDYDVDAIVPQSFLKDDSIDNKVLTRSDKNRGKSDNVPSEEVVKKMKNYWRQLLNAKLITQRKFDNLTKAERGGLSELDKAGFIKRQLVETRQITKHVAQILDSRMNTKYDENDKLIREVKVITLKSKLVSDFRKDFQFYKVREINNYHHAHDAYLNAVVGTALIKKYPKLESEFVYGDYKVYDVRKMIAKSEQEIGKATAKYFFYSNIMNFFKTEITLANGEIRKRPLIETNGETGEIVWDKGRDFATVRKVLSMPQVNIVKKTEVQTGGFSKESILPKRNSDKLIARKKDWDPKKYGGFDSPTVAYSVLVVAKVEKGKSKKLKSVKELLGITIMERSSFEKNPIDFLEAKGYKEVKKDLIIKLPKYSLFELENGRKRMLASAGELQKGNELALPSKYVNFLYLASHYEKLKGSPEDNEQKQLFVEQHKHYLDEIIEQISEFSKRVILADANLDKVLSAYNKHRDKPIREQAENIIHLFTLTNLGAPAAFKYFDTTIDRKRYTSTKEVLDATLIHQSITGLYETRIDLSQLGGDSGGSSGGSSGSETPGTSESATPESSGGSSGGSSDKWKHKFELKENRWVYVPSEEMLKFGKKIHQYIRHKWKYPLYMYHLRDGGHVAAAKLHIKNDYFSLIDISDFFGSTSQSRVTDELKKLIPYAKAREIAKLSTVRIPNANGLKHAIPYGYPQSPILATLLFHNSYCGGVINTINKSGHVTVSVYMDDIILSSDDLAQLNQAFDTVCEALRKSRYEVNENKTQSPSTMINVFNLELSGNSLRVSPERMVQFIQAYVKSDNEHERKGIASYVHSVNPDQARLHFSGGSKRTADGSEFEPKKKRKV

SEQ ID NO: 1707 - protein, 1691 aa, synthetic construct
MKRTADGSEFESPKKKRKVDKKYSIGLDIGTNSVGWAVITDEYKVPSKKFKVLGNTDRHSIKKNLIGALLFDSGETAEATRLKRTARRRYTRRKNRICYLQEIFSNEMAKVDDSFFHRLEESFLVEEDKKHERHPIFGNIVDEVAYHEKYPTIYHLRKKLVDSTDKADLRLIYLALAHMIKFRGHFLIEGDLNPDNSDVDKLFIQLVQTYNQLFEENPINASGVDAKAILSARLSKSRRLENLIAQLPGEKKNGLFGNLIALSLGLTPNFKSNFDLAEDAKLQLSKDTYDDDLDNLLAQIGDQYADLFLAAKNLSDAILLSDILRVNTEITKAPLSASMIKRYDEHHQDLTLLKALVRQQLPEKYKEIFFDQSKNGYAGYIDGGASQEEFYKFIKPILEKMDGTEELLVKLNREDLLRKQRTFDNGSIPHQIHLGELHAILRRQEDFYPFLKDNREKIEKILTFRIPYYVGPLARGNSRFAWMTRKSEETITPWNFEEVVDKGASAQSFIERMTNFDKNLPNEKVLPKHSLLYEYFTVYNELTKVKYVTEGMRKPAFLSGEQKKAIVDLLFKTNRKVTVKQLKEDYFKKIECFDSVEISGVEDRFNASLGTYHDLLKIIKDKDFLDNEENEDILEDIVLTLTLFEDREMIEERLKTYAHLFDDKVMKQLKRRRYTGWGRLSRKLINGIRDKQSGKTILDFLKSDGFANRNFMQLIHDDSLTFKEDIQKAQVSGQGDSLHEHIANLAGSPAIKKGILQTVKVVDELVKVMGRHKPENIVIEMARENQTTQKGQKNSRERMKRIEEGIKELGSQILKEHPVENTQLQNEKLYLYYLQNGRDMYVDQELDINRLSDYDVDAIVPQSFLKDDSIDNKVLTRSDKNRGKSDNVPSEEVVKKMKNYWRQLLNAKLITQRKFDNLTKAERGGLSELDKAGFIKRQLVETRQITKHVAQILDSRMNTKYDENDKLIREVKVITLKSKLVSDFRKDFQFYKVREINNYHHAHDAYLNAVVGTALIKKYPKLESEFVYGDYKVYDVRKMIAKSEQEIGKATAKYFFYSNIMNFFKTEITLANGEIRKRPLIETNGETGEIVWDKGRDFATVRKVLSMPQVNIVKKTEVQTGGFSKESILPKRNSDKLIARKKDWDPKKYGGFDSPTVAYSVLVVAKVEKGKSKKLKSVKELLGITIMERSSFEKNPIDFLEAKGYKEVKKDLIIKLPKYSLFELENGRKRMLASAGELQKGNELALPSKYVNFLYLASHYEKLKGSPEDNEQKQLFVEQHKHYLDEIIEQISEFSKRVILADANLDKVLSAYNKHRDKPIREQAENIIHLFTLTNLGAPAAFKYFDTTIDRKRYTSTKEVLDATLIHQSITGLYETRIDLSQLGGDSGGSSGGSSGSETPGTSESATPESSGGSSGGSSDKWEHKFELKENRWVYVPSEEMLKFGKKIHQYIRHKWKYPLYMYHLRDGGHVAAAKLHIKNDYFSLIDISDFFGSTSQSRVTDELKKLIPYAKAREIAKLSTVRPPNANGLKHAIPYGYPQSPILATLMFHNSYCGGVINTINKSGHVTVSVYMDDIILSSDDLAQLNQAFDTVCEALRKSRYEVNENKTQSPSTMINVFNLELSGNSLRVSPERGVQFIQAYVKSDNEHERKGIASYVHSVNQDQARLHFSGGSKRTADGSEFEPKKKRKV

SEQ ID NO: 1708 - protein, 1691 aa, synthetic construct
MKRTADGSEFESPKKKRKVDKKYSIGLDIGTNSVGWAVITDEYKVPSKKFKVLGNTDRHSIKKNLIGALLFDSGETAEATRLKRTARRRYTRRKNRICYLQEIFSNEMAKVDDSFFHRLEESFLVEEDKKHERHPIFGNIVDEVAYHEKYPTIYHLRKKLVDSTDKADLRLIYLALAHMIKFRGHFLIEGDLNPDNSDVDKLFIQLVQTYNQLFEENPINASGVDAKAILSARLSKSRRLENLIAQLPGEKKNGLFGNLIALSLGLTPNFKSNFDLAEDAKLQLSKDTYDDDLDNLLAQIGDQYADLFLAAKNLSDAILLSDILRVNTEITKAPLSASMIKRYDEHHQDLTLLKALVRQQLPEKYKEIFFDQSKNGYAGYIDGGASQEEFYKFIKPILEKMDGTEELLVKLNREDLLRKQRTFDNGSIPHQIHLGELHAILRRQEDFYPFLKDNREKIEKILTFRIPYYVGPLARGNSRFAWMTRKSEETITPWNFEEVVDKGASAQSFIERMTNFDKNLPNEKVLPKHSLLYEYFTVYNELTKVKYVTEGMRKPAFLSGEQKKAIVDLLFKTNRKVTVKQLKEDYFKKIECFDSVEISGVEDRFNASLGTYHDLLKIIKDKDFLDNEENEDILEDIVLTLTLFEDREMIEERLKTYAHLFDDKVMKQLKRRRYTGWGRLSRKLINGIRDKQSGKTILDFLKSDGFANRNFMQLIHDDSLTFKEDIQKAQVSGQGDSLHEHIANLAGSPAIKKGILQTVKVVDELVKVMGRHKPENIVIEMARENQTTQKGQKNSRERMKRIEEGIKELGSQILKEHPVENTQLQNEKLYLYYLQNGRDMYVDQELDINRLSDYDVDAIVPQSFLKDDSIDNKVLTRSDKNRGKSDNVPSEEVVKKMKNYWRQLLNAKLITQRKFDNLTKAERGGLSELDKAGFIKRQLVETRQITKHVAQILDSRMNTKYDENDKLIREVKVITLKSKLVSDFRKDFQFYKVREINNYHHAHDAYLNAVVGTALIKKYPKLESEFVYGDYKVYDVRKMIAKSEQEIGKATAKYFFYSNIMNFFKTEITLANGEIRKRPLIETNGETGEIVWDKGRDFATVRKVLSMPQVNIVKKTEVQTGGFSKESILPKRNSDKLIARKKDWDPKKYGGFDSPTVAYSVLVVAKVEKGKSKKLKSVKELLGITIMERSSFEKNPIDFLEAKGYKEVKKDLIIKLPKYSLFELENGRKRMLASAGELQKGNELALPSKYVNFLYLASHYEKLKGSPEDNEQKQLFVEQHKHYLDEIIEQISEFSKRVILADANLDKVLSAYNKHRDKPIREQAENIIHLFTLTNLGAPAAFKYFDTTIDRKRYTSTKEVLDATLIHQSITGLYETRIDLSQLGGDSGGSSGGSSGSETPGTSESATPESSGGSSGGSSDKWKHKNELKENRWVYVPSEEMLKFGKKIHQYIRHKWKYPLYMYHLRDGGHVAAAKLHIKNDYFSLIDISDFFGSTSQSRVTDELKKLIPYAKAREIAKLSTVRIPNANGLKHAIPYGYPQSPILATLMFHNSYCGGVINTINKSGHVTVSVYMDDIILSSDDLAQLNQAFDTVCEALRKSRYEVNENKTQSPSTMINVFNLELSHNSLRVSPERMVQFIQAYVKSDNEHERKGIASYVHSVNPDQARLHFSGGSKRTADGSEFEPKKKRKV

SEQ ID NO: 1709 - protein, 1691 aa, synthetic construct
MKRTADGSEFESPKKKRKVDKKYSIGLDIGTNSVGWAVITDEYKVPSKKFKVLGNTDRHSIKKNLIGALLFDSGETAEATRLKRTARRRYTRRKNRICYLQEIFSNEMAKVDDSFFHRLEESFLVEEDKKHERHPIFGNIVDEVAYHEKYPTIYHLRKKLVDSTDKADLRLIYLALAHMIKFRGHFLIEGDLNPDNSDVDKLFIQLVQTYNQLFEENPINASGVDAKAILSARLSKSRRLENLIAQLPGEKKNGLFGNLIALSLGLTPNFKSNFDLAEDAKLQLSKDTYDDDLDNLLAQIGDQYADLFLAAKNLSDAILLSDILRVNTEITKAPLSASMIKRYDEHHQDLTLLKALVRQQLPEKYKEIFFDQSKNGYAGYIDGGASQEEFYKFIKPILEKMDGTEELLVKLNREDLLRKQRTFDNGSIPHQIHLGELHAILRRQEDFYPFLKDNREKIEKILTFRIPYYVGPLARGNSRFAWMTRKSEETITPWNFEEVVDKGASAQSFIERMTNFDKNLPNEKVLPKHSLLYEYFTVYNELTKVKYVTEGMRKPAFLSGEQKKAIVDLLFKTNRKVTVKQLKEDYFKKIECFDSVEISGVEDRFNASLGTYHDLLKIIKDKDFLDNEENEDILEDIVLTLTLFEDREMIEERLKTYAHLFDDKVMKQLKRRRYTGWGRLSRKLINGIRDKQSGKTILDFLKSDGFANRNFMQLIHDDSLTFKEDIQKAQVSGQGDSLHEHIANLAGSPAIKKGILQTVKVVDELVKVMGRHKPENIVIEMARENQTTQKGQKNSRERMKRIEEGIKELGSQILKEHPVENTQLQNEKLYLYYLQNGRDMYVDQELDINRLSDYDVDAIVPQSFLKDDSIDNKVLTRSDKNRGKSDNVPSEEVVKKMKNYWRQLLNAKLITQRKFDNLTKAERGGLSELDKAGFIKRQLVETRQITKHVAQILDSRMNTKYDENDKLIREVKVITLKSKLVSDFRKDFQFYKVREINNYHHAHDAYLNAVVGTALIKKYPKLESEFVYGDYKVYDVRKMIAKSEQEIGKATAKYFFYSNIMNFFKTEITLANGEIRKRPLIETNGETGEIVWDKGRDFATVRKVLSMPQVNIVKKTEVQTGGFSKESILPKRNSDKLIARKKDWDPKKYGGFDSPTVAYSVLVVAKVEKGKSKKLKSVKELLGITIMERSSFEKNPIDFLEAKGYKEVKKDLIIKLPKYSLFELENGRKRMLASAGELQKGNELALPSKYVNFLYLASHYEKLKGSPEDNEQKQLFVEQHKHYLDEIIEQISEFSKRVILADANLDKVLSAYNKHRDKPIREQAENIIHLFTLTNLGAPAAFKYFDTTIDRKRYTSTKEVLDATLIHQSITGLYETRIDLSQLGGDSGGSSGGSSGSETPGTSESATPESSGGSSGGSSDKWKHKFELKENRWQYVPSEEMLKFGKKIHQYIRHKWKYPLYMYHLRDGGHVAAAKLHIKNDYFSLIDISDFFGSTSQSRVTDELKKLIPYAKAREIAKLSTVRIPNANGLKHAIPYGYPQSPILATLMFHNSYCGGVINTINKSGHVTVSVYMDDIILSSDDLAQLNQAFDTVCEALRKSRYEVNENKTQSPSTMINVFNLELSHNSLRVSPERMVQFIQAYVKSDNEHERKGIASYVHSVNPDQARLHFSGGSKRTADGSEFEPKKKRKV

SEQ ID NO: 1710 - protein, 1691 aa, synthetic construct
MKRTADGSEFESPKKKRKVDKKYSIGLDIGTNSVGWAVITDEYKVPSKKFKVLGNTDRHSIKKNLIGALLFDSGETAEATRLKRTARRRYTRRKNRICYLQEIFSNEMAKVDDSFFHRLEESFLVEEDKKHERHPIFGNIVDEVAYHEKYPTIYHLRKKLVDSTDKADLRLIYLALAHMIKFRGHFLIEGDLNPDNSDVDKLFIQLVQTYNQLFEENPINASGVDAKAILSARLSKSRRLENLIAQLPGEKKNGLFGNLIALSLGLTPNFKSNFDLAEDAKLQLSKDTYDDDLDNLLAQIGDQYADLFLAAKNLSDAILLSDILRVNTEITKAPLSASMIKRYDEHHQDLTLLKALVRQQLPEKYKEIFFDQSKNGYAGYIDGGASQEEFYKFIKPILEKMDGTEELLVKLNREDLLRKQRTFDNGSIPHQIHLGELHAILRRQEDFYPFLKDNREKIEKILTFRIPYYVGPLARGNSRFAWMTRKSEETITPWNFEEVVDKGASAQSFIERMTNFDKNLPNEKVLPKHSLLYEYFTVYNELTKVKYVTEGMRKPAFLSGEQKKAIVDLLFKTNRKVTVKQLKEDYFKKIECFDSVEISGVEDRFNASLGTYHDLLKIIKDKDFLDNEENEDILEDIVLTLTLFEDREMIEERLKTYAHLFDDKVMKQLKRRRYTGWGRLSRKLINGIRDKQSGKTILDFLKSDGFANRNFMQLIHDDSLTFKEDIQKAQVSGQGDSLHEHIANLAGSPAIKKGILQTVKVVDELVKVMGRHKPENIVIEMARENQTTQKGQKNSRERMKRIEEGIKELGSQILKEHPVENTQLQNEKLYLYYLQNGRDMYVDQELDINRLSDYDVDAIVPQSFLKDDSIDNKVLTRSDKNRGKSDNVPSEEVVKKMKNYWRQLLNAKLITQRKFDNLTKAERGGLSELDKAGFIKRQLVETRQITKHVAQILDSRMNTKYDENDKLIREVKVITLKSKLVSDFRKDFQFYKVREINNYHHAHDAYLNAVVGTALIKKYPKLESEFVYGDYKVYDVRKMIAKSEQEIGKATAKYFFYSNIMNFFKTEITLANGEIRKRPLIETNGETGEIVWDKGRDFATVRKVLSMPQVNIVKKTEVQTGGFSKESILPKRNSDKLIARKKDWDPKKYGGFDSPTVAYSVLVVAKVEKGKSKKLKSVKELLGITIMERSSFEKNPIDFLEAKGYKEVKKDLIIKLPKYSLFELENGRKRMLASAGELQKGNELALPSKYVNFLYLASHYEKLKGSPEDNEQKQLFVEQHKHYLDEIIEQISEFSKRVILADANLDKVLSAYNKHRDKPIREQAENIIHLFTLTNLGAPAAFKYFDTTIDRKRYTSTKEVLDATLIHQSITGLYETRIDLSQLGGDSGGSSGGSSGSETPGTSESATPESSGGSSGGSSDKWKHKFELKENRWVAVPSEEMLKFGKKIHQYIRHKWKYPLYMYHLRDGGHVAAAKLHIKNDYFSLIDISDFFGSTSQSRVTDELKKLIPYAKAREIAKLSTVRIPNANGLKHAIPYGYPQSPILATLMFHNSYCGGVINTINKSGHVTVSVYMDDIILSSDDLAQLNQAFDTVCEALRKSRYEVNENKTQSPSTMINVFNLELSHNSLRVSPERMVQFIQAYVKSDNEHERKGIASYVHSVNPDQARLHFSGGSKRTADGSEFEPKKKRKV

SEQ ID NO: 1711 - protein, 1691 aa, synthetic construct
MKRTADGSEFESPKKKRKVDKKYSIGLDIGTNSVGWAVITDEYKVPSKKFKVLGNTDRHSIKKNLIGALLFDSGETAEATRLKRTARRRYTRRKNRICYLQEIFSNEMAKVDDSFFHRLEESFLVEEDKKHERHPIFGNIVDEVAYHEKYPTIYHLRKKLVDSTDKADLRLIYLALAHMIKFRGHFLIEGDLNPDNSDVDKLFIQLVQTYNQLFEENPINASGVDAKAILSARLSKSRRLENLIAQLPGEKKNGLFGNLIALSLGLTPNFKSNFDLAEDAKLQLSKDTYDDDLDNLLAQIGDQYADLFLAAKNLSDAILLSDILRVNTEITKAPLSASMIKRYDEHHQDLTLLKALVRQQLPEKYKEIFFDQSKNGYAGYIDGGASQEEFYKFIKPILEKMDGTEELLVKLNREDLLRKQRTFDNGSIPHQIHLGELHAILRRQEDFYPFLKDNREKIEKILTFRIPYYVGPLARGNSRFAWMTRKSEETITPWNFEEVVDKGASAQSFIERMTNFDKNLPNEKVLPKHSLLYEYFTVYNELTKVKYVTEGMRKPAFLSGEQKKAIVDLLFKTNRKVTVKQLKEDYFKKIECFDSVEISGVEDRFNASLGTYHDLLKIIKDKDFLDNEENEDILEDIVLTLTLFEDREMIEERLKTYAHLFDDKVMKQLKRRRYTGWGRLSRKLINGIRDKQSGKTILDFLKSDGFANRNFMQLIHDDSLTFKEDIQKAQVSGQGDSLHEHIANLAGSPAIKKGILQTVKVVDELVKVMGRHKPENIVIEMARENQTTQKGQKNSRERMKRIEEGIKELGSQILKEHPVENTQLQNEKLYLYYLQNGRDMYVDQELDINRLSDYDVDAIVPQSFLKDDSIDNKVLTRSDKNRGKSDNVPSEEVVKKMKNYWRQLLNAKLITQRKFDNLTKAERGGLSELDKAGFIKRQLVETRQITKHVAQILDSRMNTKYDENDKLIREVKVITLKSKLVSDFRKDFQFYKVREINNYHHAHDAYLNAVVGTALIKKYPKLESEFVYGDYKVYDVRKMIAKSEQEIGKATAKYFFYSNIMNFFKTEITLANGEIRKRPLIETNGETGEIVWDKGRDFATVRKVLSMPQVNIVKKTEVQTGGFSKESILPKRNSDKLIARKKDWDPKKYGGFDSPTVAYSVLVVAKVEKGKSKKLKSVKELLGITIMERSSFEKNPIDFLEAKGYKEVKKDLIIKLPKYSLFELENGRKRMLASAGELQKGNELALPSKYVNFLYLASHYEKLKGSPEDNEQKQLFVEQHKHYLDEIIEQISEFSKRVILADANLDKVLSAYNKHRDKPIREQAENIIHLFTLTNLGAPAAFKYFDTTIDRKRYTSTKEVLDATLIHQSITGLYETRIDLSQLGGDSGGSSGGSSGSETPGTSESATPESSGGSSGGSSDKWKHKFELKENRWVYVPSEEMLKFGKKIHQYIRHKWKYPLYMYHLRDGGHVAAAKLHIKNDYFSLIDISDFFGSTSQSRVTDELKKLIPYAKAREIAKLSTVRIPNANGLKHAIPYGYPQSPILATLMFHNSYCGGVINTINKSGHVTVSVYMDDIILSSDDLAQLNQAFDTVCEALRKSRYEVNENNTQSPSTMINVFNLELSHNSLRVSPERMVQFIQAYVKSDNEHERKGIASYVHSVNPDQARLHFSGGSKRTADGSEFEPKKKRKV

SEQ ID NO: 1712 - protein, 1691 aa, synthetic construct
MKRTADGSEFESPKKKRKVDKKYSIGLDIGTNSVGWAVITDEYKVPSKKFKVLGNTDRHSIKKNLIGALLFDSGETAEATRLKRTARRRYTRRKNRICYLQEIFSNEMAKVDDSFFHRLEESFLVEEDKKHERHPIFGNIVDEVAYHEKYPTIYHLRKKLVDSTDKADLRLIYLALAHMIKFRGHFLIEGDLNPDNSDVDKLFIQLVQTYNQLFEENPINASGVDAKAILSARLSKSRRLENLIAQLPGEKKNGLFGNLIALSLGLTPNFKSNFDLAEDAKLQLSKDTYDDDLDNLLAQIGDQYADLFLAAKNLSDAILLSDILRVNTEITKAPLSASMIKRYDEHHQDLTLLKALVRQQLPEKYKEIFFDQSKNGYAGYIDGGASQEEFYKFIKPILEKMDGTEELLVKLNREDLLRKQRTFDNGSIPHQIHLGELHAILRRQEDFYPFLKDNREKIEKILTFRIPYYVGPLARGNSRFAWMTRKSEETITPWNFEEVVDKGASAQSFIERMTNFDKNLPNEKVLPKHSLLYEYFTVYNELTKVKYVTEGMRKPAFLSGEQKKAIVDLLFKTNRKVTVKQLKEDYFKKIECFDSVEISGVEDRFNASLGTYHDLLKIIKDKDFLDNEENEDILEDIVLTLTLFEDREMIEERLKTYAHLFDDKVMKQLKRRRYTGWGRLSRKLINGIRDKQSGKTILDFLKSDGFANRNFMQLIHDDSLTFKEDIQKAQVSGQGDSLHEHIANLAGSPAIKKGILQTVKVVDELVKVMGRHKPENIVIEMARENQTTQKGQKNSRERMKRIEEGIKELGSQILKEHPVENTQLQNEKLYLYYLQNGRDMYVDQELDINRLSDYDVDAIVPQSFLKDDSIDNKVLTRSDKNRGKSDNVPSEEVVKKMKNYWRQLLNAKLITQRKFDNLTKAERGGLSELDKAGFIKRQLVETRQITKHVAQILDSRMNTKYDENDKLIREVKVITLKSKLVSDFRKDFQFYKVREINNYHHAHDAYLNAVVGTALIKKYPKLESEFVYGDYKVYDVRKMIAKSEQEIGKATAKYFFYSNIMNFFKTEITLANGEIRKRPLIETNGETGEIVWDKGRDFATVRKVLSMPQVNIVKKTEVQTGGFSKESILPKRNSDKLIARKKDWDPKKYGGFDSPTVAYSVLVVAKVEKGKSKKLKSVKELLGITIMERSSFEKNPIDFLEAKGYKEVKKDLIIKLPKYSLFELENGRKRMLASAGELQKGNELALPSKYVNFLYLASHYEKLKGSPEDNEQKQLFVEQHKHYLDEIIEQISEFSKRVILADANLDKVLSAYNKHRDKPIREQAENIIHLFTLTNLGAPAAFKYFDTTIDRKRYTSTKEVLDATLIHQSITGLYETRIDLSQLGGDSGGSSGGSSGSETPGTSESATPESSGGSSGGSSDKWKHKFELKENRWVYVPSEEMLKFGKKIHQYIRHKWKYPLYMYHLRDGGHVAAAKLHIKNDYFSLIDISDFFGSTSQSRVTDELKKLIPYAKAREIAKLSTVRIPNANGLKHAIPYGYPQSPILATLMFHNSYCGGVINTINKSGHVTVSVYMDDIILSSDDLAQLNQAFDTVCEALRKSRYEVNENKTQSPSTMINVWNLELSHNSLRVSPERMVQFIQAYVKSDNEHERKGIASYVHSVNPDQARLHFSGGSKRTADGSEFEPKKKRKV

SEQ ID NO: 1713 - protein, 1691 aa, synthetic construct
MKRTADGSEFESPKKKRKVDKKYSIGLDIGTNSVGWAVITDEYKVPSKKFKVLGNTDRHSIKKNLIGALLFDSGETAEATRLKRTARRRYTRRKNRICYLQEIFSNEMAKVDDSFFHRLEESFLVEEDKKHERHPIFGNIVDEVAYHEKYPTIYHLRKKLVDSTDKADLRLIYLALAHMIKFRGHFLIEGDLNPDNSDVDKLFIQLVQTYNQLFEENPINASGVDAKAILSARLSKSRRLENLIAQLPGEKKNGLFGNLIALSLGLTPNFKSNFDLAEDAKLQLSKDTYDDDLDNLLAQIGDQYADLFLAAKNLSDAILLSDILRVNTEITKAPLSASMIKRYDEHHQDLTLLKALVRQQLPEKYKEIFFDQSKNGYAGYIDGGASQEEFYKFIKPILEKMDGTEELLVKLNREDLLRKQRTFDNGSIPHQIHLGELHAILRRQEDFYPFLKDNREKIEKILTFRIPYYVGPLARGNSRFAWMTRKSEETITPWNFEEVVDKGASAQSFIERMTNFDKNLPNEKVLPKHSLLYEYFTVYNELTKVKYVTEGMRKPAFLSGEQKKAIVDLLFKTNRKVTVKQLKEDYFKKIECFDSVEISGVEDRFNASLGTYHDLLKIIKDKDFLDNEENEDILEDIVLTLTLFEDREMIEERLKTYAHLFDDKVMKQLKRRRYTGWGRLSRKLINGIRDKQSGKTILDFLKSDGFANRNFMQLIHDDSLTFKEDIQKAQVSGQGDSLHEHIANLAGSPAIKKGILQTVKVVDELVKVMGRHKPENIVIEMARENQTTQKGQKNSRERMKRIEEGIKELGSQILKEHPVENTQLQNEKLYLYYLQNGRDMYVDQELDINRLSDYDVDAIVPQSFLKDDSIDNKVLTRSDKNRGKSDNVPSEEVVKKMKNYWRQLLNAKLITQRKFDNLTKAERGGLSELDKAGFIKRQLVETRQITKHVAQILDSRMNTKYDENDKLIREVKVITLKSKLVSDFRKDFQFYKVREINNYHHAHDAYLNAVVGTALIKKYPKLESEFVYGDYKVYDVRKMIAKSEQEIGKATAKYFFYSNIMNFFKTEITLANGEIRKRPLIETNGETGEIVWDKGRDFATVRKVLSMPQVNIVKKTEVQTGGFSKESILPKRNSDKLIARKKDWDPKKYGGFDSPTVAYSVLVVAKVEKGKSKKLKSVKELLGITIMERSSFEKNPIDFLEAKGYKEVKKDLIIKLPKYSLFELENGRKRMLASAGELQKGNELALPSKYVNFLYLASHYEKLKGSPEDNEQKQLFVEQHKHYLDEIIEQISEFSKRVILADANLDKVLSAYNKHRDKPIREQAENIIHLFTLTNLGAPAAFKYFDTTIDRKRYTSTKEVLDATLIHQSITGLYETRIDLSQLGGDSGGSSGGSSGSETPGTSESATPESSGGSSGGSSDKWKHKFELKENRWVYVPSEEMLKFGKKIHQYIRHKWKYPLYMYHLRDGGHVAAAKLHIKNDYFSLIDISDFFGSTSQSRVTDELKKLIPYAKAREIAKLSTVRIPNANGLKHAIPYGYPQSPILATLMFHNSYCGGVINTINKSGHVTVSVYMDDIILSSDDLAQLNQAFDTVCEALRKSRYEVNENKTQSPSTMINVFNLELSHNSLRVSPERMVQFIQAYVKSDNEHERKGIASYVHSVNPDQARLHKSGGSKRTADGSEFEPKKKRKV

SEQ ID NO: 1714 - protein, 1691 aa, synthetic construct
MKRTADGSEFESPKKKRKVDKKYSIGLDIGTNSVGWAVITDEYKVPSKKFKVLGNTDRHSIKKNLIGALLFDSGETAEATRLKRTARRRYTRRKNRICYLQEIFSNEMAKVDDSFFHRLEESFLVEEDKKHERHPIFGNIVDEVAYHEKYPTIYHLRKKLVDSTDKADLRLIYLALAHMIKFRGHFLIEGDLNPDNSDVDKLFIQLVQTYNQLFEENPINASGVDAKAILSARLSKSRRLENLIAQLPGEKKNGLFGNLIALSLGLTPNFKSNFDLAEDAKLQLSKDTYDDDLDNLLAQIGDQYADLFLAAKNLSDAILLSDILRVNTEITKAPLSASMIKRYDEHHQDLTLLKALVRQQLPEKYKEIFFDQSKNGYAGYIDGGASQEEFYKFIKPILEKMDGTEELLVKLNREDLLRKQRTFDNGSIPHQIHLGELHAILRRQEDFYPFLKDNREKIEKILTFRIPYYVGPLARGNSRFAWMTRKSEETITPWNFEEVVDKGASAQSFIERMTNFDKNLPNEKVLPKHSLLYEYFTVYNELTKVKYVTEGMRKPAFLSGEQKKAIVDLLFKTNRKVTVKQLKEDYFKKIECFDSVEISGVEDRFNASLGTYHDLLKIIKDKDFLDNEENEDILEDIVLTLTLFEDREMIEERLKTYAHLFDDKVMKQLKRRRYTGWGRLSRKLINGIRDKQSGKTILDFLKSDGFANRNFMQLIHDDSLTFKEDIQKAQVSGQGDSLHEHIANLAGSPAIKKGILQTVKVVDELVKVMGRHKPENIVIEMARENQTTQKGQKNSRERMKRIEEGIKELGSQILKEHPVENTQLQNEKLYLYYLQNGRDMYVDQELDINRLSDYDVDAIVPQSFLKDDSIDNKVLTRSDKNRGKSDNVPSEEVVKKMKNYWRQLLNAKLITQRKFDNLTKAERGGLSELDKAGFIKRQLVETRQITKHVAQILDSRMNTKYDENDKLIREVKVITLKSKLVSDFRKDFQFYKVREINNYHHAHDAYLNAVVGTALIKKYPKLESEFVYGDYKVYDVRKMIAKSEQEIGKATAKYFFYSNIMNFFKTEITLANGEIRKRPLIETNGETGEIVWDKGRDFATVRKVLSMPQVNIVKKTEVQTGGFSKESILPKRNSDKLIARKKDWDPKKYGGFDSPTVAYSVLVVAKVEKGKSKKLKSVKELLGITIMERSSFEKNPIDFLEAKGYKEVKKDLIIKLPKYSLFELENGRKRMLASAGELQKGNELALPSKYVNFLYLASHYEKLKGSPEDNEQKQLFVEQHKHYLDEIIEQISEFSKRVILADANLDKVLSAYNKHRDKPIREQAENIIHLFTLTNLGAPAAFKYFDTTIDRKRYTSTKEVLDATLIHQSITGLYETRIDLSQLGGDSGGSSGGSSGSETPGTSESATPESSGGSSGGSSDKWKHKNELKENRWVQVPSEEMLKFGKKIHQYIRHKWKYPLYMYHLRDGGHVAAAKLHIKNDYFSLIDISDFFGSTSQSRVTDELKKLIPYAKAREIAKLSTVRIPNANGLKHAIPYGYPQSPILATLMFHNSYCGGVINTINKSGHVTVSVYMDDIILSSDDLAQLNQAFDTVCEALRKSRYEVNENKTQSPSTMINVFNLELSHNSLRVSPERMVQFIQAYVKSDNEHERKGIASYVHSVNPDQARLHFSGGSKRTADGSEFEPKKKRKV

SEQ ID NO: 1715 - protein, 1691 aa, synthetic construct
MKRTADGSEFESPKKKRKVDKKYSIGLDIGTNSVGWAVITDEYKVPSKKFKVLGNTDRHSIKKNLIGALLFDSGETAEATRLKRTARRRYTRRKNRICYLQEIFSNEMAKVDDSFFHRLEESFLVEEDKKHERHPIFGNIVDEVAYHEKYPTIYHLRKKLVDSTDKADLRLIYLALAHMIKFRGHFLIEGDLNPDNSDVDKLFIQLVQTYNQLFEENPINASGVDAKAILSARLSKSRRLENLIAQLPGEKKNGLFGNLIALSLGLTPNFKSNFDLAEDAKLQLSKDTYDDDLDNLLAQIGDQYADLFLAAKNLSDAILLSDILRVNTEITKAPLSASMIKRYDEHHQDLTLLKALVRQQLPEKYKEIFFDQSKNGYAGYIDGGASQEEFYKFIKPILEKMDGTEELLVKLNREDLLRKQRTFDNGSIPHQIHLGELHAILRRQEDFYPFLKDNREKIEKILTFRIPYYVGPLARGNSRFAWMTRKSEETITPWNFEEVVDKGASAQSFIERMTNFDKNLPNEKVLPKHSLLYEYFTVYNELTKVKYVTEGMRKPAFLSGEQKKAIVDLLFKTNRKVTVKQLKEDYFKKIECFDSVEISGVEDRFNASLGTYHDLLKIIKDKDFLDNEENEDILEDIVLTLTLFEDREMIEERLKTYAHLFDDKVMKQLKRRRYTGWGRLSRKLINGIRDKQSGKTILDFLKSDGFANRNFMQLIHDDSLTFKEDIQKAQVSGQGDSLHEHIANLAGSPAIKKGILQTVKVVDELVKVMGRHKPENIVIEMARENQTTQKGQKNSRERMKRIEEGIKELGSQILKEHPVENTQLQNEKLYLYYLQNGRDMYVDQELDINRLSDYDVDAIVPQSFLKDDSIDNKVLTRSDKNRGKSDNVPSEEVVKKMKNYWRQLLNAKLITQRKFDNLTKAERGGLSELDKAGFIKRQLVETRQITKHVAQILDSRMNTKYDENDKLIREVKVITLKSKLVSDFRKDFQFYKVREINNYHHAHDAYLNAVVGTALIKKYPKLESEFVYGDYKVYDVRKMIAKSEQEIGKATAKYFFYSNIMNFFKTEITLANGEIRKRPLIETNGETGEIVWDKGRDFATVRKVLSMPQVNIVKKTEVQTGGFSKESILPKRNSDKLIARKKDWDPKKYGGFDSPTVAYSVLVVAKVEKGKSKKLKSVKELLGITIMERSSFEKNPIDFLEAKGYKEVKKDLIIKLPKYSLFELENGRKRMLASAGELQKGNELALPSKYVNFLYLASHYEKLKGSPEDNEQKQLFVEQHKHYLDEIIEQISEFSKRVILADANLDKVLSAYNKHRDKPIREQAENIIHLFTLTNLGAPAAFKYFDTTIDRKRYTSTKEVLDATLIHQSITGLYETRIDLSQLGGDSGGSSGGSSGSETPGTSESATPESSGGSSGGSSDKWKHKNELKENRWVAVPSEEMLKFGKKIHQYIRHKWKYPLYMYHLRDGGHVAAAKLHIKNDYFSLIDISDFFGSTSQSRVTDELKKLIPYAKAREIAKLSTVRIPNANGLKHAIPYGYPQSPILATLMFHNSYCGGVINTINKSGHVTVSVYMDDIILSSDDLAQLNQAFDTVCEALRKSRYEVNENKTQSPSTMINVFNLELSHNSLRVSPERMVQFIQAYVKSDNEHERKGIASYVHSVNPDQARLHFSGGSKRTADGSEFEPKKKRKV

SEQ ID NO: 1716 - protein, 1691 aa, synthetic construct
MKRTADGSEFESPKKKRKVDKKYSIGLDIGTNSVGWAVITDEYKVPSKKFKVLGNTDRHSIKKNLIGALLFDSGETAEATRLKRTARRRYTRRKNRICYLQEIFSNEMAKVDDSFFHRLEESFLVEEDKKHERHPIFGNIVDEVAYHEKYPTIYHLRKKLVDSTDKADLRLIYLALAHMIKFRGHFLIEGDLNPDNSDVDKLFIQLVQTYNQLFEENPINASGVDAKAILSARLSKSRRLENLIAQLPGEKKNGLFGNLIALSLGLTPNFKSNFDLAEDAKLQLSKDTYDDDLDNLLAQIGDQYADLFLAAKNLSDAILLSDILRVNTEITKAPLSASMIKRYDEHHQDLTLLKALVRQQLPEKYKEIFFDQSKNGYAGYIDGGASQEEFYKFIKPILEKMDGTEELLVKLNREDLLRKQRTFDNGSIPHQIHLGELHAILRRQEDFYPFLKDNREKIEKILTFRIPYYVGPLARGNSRFAWMTRKSEETITPWNFEEVVDKGASAQSFIERMTNFDKNLPNEKVLPKHSLLYEYFTVYNELTKVKYVTEGMRKPAFLSGEQKKAIVDLLFKTNRKVTVKQLKEDYFKKIECFDSVEISGVEDRFNASLGTYHDLLKIIKDKDFLDNEENEDILEDIVLTLTLFEDREMIEERLKTYAHLFDDKVMKQLKRRRYTGWGRLSRKLINGIRDKQSGKTILDFLKSDGFANRNFMQLIHDDSLTFKEDIQKAQVSGQGDSLHEHIANLAGSPAIKKGILQTVKVVDELVKVMGRHKPENIVIEMARENQTTQKGQKNSRERMKRIEEGIKELGSQILKEHPVENTQLQNEKLYLYYLQNGRDMYVDQELDINRLSDYDVDAIVPQSFLKDDSIDNKVLTRSDKNRGKSDNVPSEEVVKKMKNYWRQLLNAKLITQRKFDNLTKAERGGLSELDKAGFIKRQLVETRQITKHVAQILDSRMNTKYDENDKLIREVKVITLKSKLVSDFRKDFQFYKVREINNYHHAHDAYLNAVVGTALIKKYPKLESEFVYGDYKVYDVRKMIAKSEQEIGKATAKYFFYSNIMNFFKTEITLANGEIRKRPLIETNGETGEIVWDKGRDFATVRKVLSMPQVNIVKKTEVQTGGFSKESILPKRNSDKLIARKKDWDPKKYGGFDSPTVAYSVLVVAKVEKGKSKKLKSVKELLGITIMERSSFEKNPIDFLEAKGYKEVKKDLIIKLPKYSLFELENGRKRMLASAGELQKGNELALPSKYVNFLYLASHYEKLKGSPEDNEQKQLFVEQHKHYLDEIIEQISEFSKRVILADANLDKVLSAYNKHRDKPIREQAENIIHLFTLTNLGAPAAFKYFDTTIDRKRYTSTKEVLDATLIHQSITGLYETRIDLSQLGGDSGGSSGGSSGSETPGTSESATPESSGGSSGGSSDKWKHKNELKENRWVYVPSEEMLKFGKKIHQYIRHKWKYPLYMYHLRDGGHVAAAKLHIKNDYFSLIDISDFFGSTSQSRVTDELKKLIPYAKAREIAKLSTVRIPNANGLKHAIPYGYPQSPILATLMFHNSYCGGVINTINKSGHVTVSVYMDDIILSSDDLAQLNQAFDTVCEALRKSRYEVNENNTQSPSTMINVFNLELSHNSLRVSPERMVQFIQAYVKSDNEHERKGIASYVHSVNPDQARLHFSGGSKRTADGSEFEPKKKRKV

SEQ ID NO: 1717 - protein, 1691 aa, synthetic construct
MKRTADGSEFESPKKKRKVDKKYSIGLDIGTNSVGWAVITDEYKVPSKKFKVLGNTDRHSIKKNLIGALLFDSGETAEATRLKRTARRRYTRRKNRICYLQEIFSNEMAKVDDSFFHRLEESFLVEEDKKHERHPIFGNIVDEVAYHEKYPTIYHLRKKLVDSTDKADLRLIYLALAHMIKFRGHFLIEGDLNPDNSDVDKLFIQLVQTYNQLFEENPINASGVDAKAILSARLSKSRRLENLIAQLPGEKKNGLFGNLIALSLGLTPNFKSNFDLAEDAKLQLSKDTYDDDLDNLLAQIGDQYADLFLAAKNLSDAILLSDILRVNTEITKAPLSASMIKRYDEHHQDLTLLKALVRQQLPEKYKEIFFDQSKNGYAGYIDGGASQEEFYKFIKPILEKMDGTEELLVKLNREDLLRKQRTFDNGSIPHQIHLGELHAILRRQEDFYPFLKDNREKIEKILTFRIPYYVGPLARGNSRFAWMTRKSEETITPWNFEEVVDKGASAQSFIERMTNFDKNLPNEKVLPKHSLLYEYFTVYNELTKVKYVTEGMRKPAFLSGEQKKAIVDLLFKTNRKVTVKQLKEDYFKKIECFDSVEISGVEDRFNASLGTYHDLLKIIKDKDFLDNEENEDILEDIVLTLTLFEDREMIEERLKTYAHLFDDKVMKQLKRRRYTGWGRLSRKLINGIRDKQSGKTILDFLKSDGFANRNFMQLIHDDSLTFKEDIQKAQVSGQGDSLHEHIANLAGSPAIKKGILQTVKVVDELVKVMGRHKPENIVIEMARENQTTQKGQKNSRERMKRIEEGIKELGSQILKEHPVENTQLQNEKLYLYYLQNGRDMYVDQELDINRLSDYDVDAIVPQSFLKDDSIDNKVLTRSDKNRGKSDNVPSEEVVKKMKNYWRQLLNAKLITQRKFDNLTKAERGGLSELDKAGFIKRQLVETRQITKHVAQILDSRMNTKYDENDKLIREVKVITLKSKLVSDFRKDFQFYKVREINNYHHAHDAYLNAVVGTALIKKYPKLESEFVYGDYKVYDVRKMIAKSEQEIGKATAKYFFYSNIMNFFKTEITLANGEIRKRPLIETNGETGEIVWDKGRDFATVRKVLSMPQVNIVKKTEVQTGGFSKESILPKRNSDKLIARKKDWDPKKYGGFDSPTVAYSVLVVAKVEKGKSKKLKSVKELLGITIMERSSFEKNPIDFLEAKGYKEVKKDLIIKLPKYSLFELENGRKRMLASAGELQKGNELALPSKYVNFLYLASHYEKLKGSPEDNEQKQLFVEQHKHYLDEIIEQISEFSKRVILADANLDKVLSAYNKHRDKPIREQAENIIHLFTLTNLGAPAAFKYFDTTIDRKRYTSTKEVLDATLIHQSITGLYETRIDLSQLGGDSGGSSGGSSGSETPGTSESATPESSGGSSGGSSDKWKHKNELKENRWVYVPSEEMLKFGKKIHQYIRHKWKYPLYMYHLRDGGHVAAAKLHIKNDYFSLIDISDFFGSTSQSRVTDELKKLIPYAKAREIAKLSTVRIPNANGLKHAIPYGYPQSPILATLMFHNSYCGGVINTINKSGHVTVSVYMDDIILSSDDLAQLNQAFDTVCEALRKSRYEVNENKTQSPSTMINVWNLELSHNSLRVSPERMVQFIQAYVKSDNEHERKGIASYVHSVNPDQARLHFSGGSKRTADGSEFEPKKKRKV

SEQ ID NO: 1718 - protein, 1691 aa, synthetic construct
MKRTADGSEFESPKKKRKVDKKYSIGLDIGTNSVGWAVITDEYKVPSKKFKVLGNTDRHSIKKNLIGALLFDSGETAEATRLKRTARRRYTRRKNRICYLQEIFSNEMAKVDDSFFHRLEESFLVEEDKKHERHPIFGNIVDEVAYHEKYPTIYHLRKKLVDSTDKADLRLIYLALAHMIKFRGHFLIEGDLNPDNSDVDKLFIQLVQTYNQLFEENPINASGVDAKAILSARLSKSRRLENLIAQLPGEKKNGLFGNLIALSLGLTPNFKSNFDLAEDAKLQLSKDTYDDDLDNLLAQIGDQYADLFLAAKNLSDAILLSDILRVNTEITKAPLSASMIKRYDEHHQDLTLLKALVRQQLPEKYKEIFFDQSKNGYAGYIDGGASQEEFYKFIKPILEKMDGTEELLVKLNREDLLRKQRTFDNGSIPHQIHLGELHAILRRQEDFYPFLKDNREKIEKILTFRIPYYVGPLARGNSRFAWMTRKSEETITPWNFEEVVDKGASAQSFIERMTNFDKNLPNEKVLPKHSLLYEYFTVYNELTKVKYVTEGMRKPAFLSGEQKKAIVDLLFKTNRKVTVKQLKEDYFKKIECFDSVEISGVEDRFNASLGTYHDLLKIIKDKDFLDNEENEDILEDIVLTLTLFEDREMIEERLKTYAHLFDDKVMKQLKRRRYTGWGRLSRKLINGIRDKQSGKTILDFLKSDGFANRNFMQLIHDDSLTFKEDIQKAQVSGQGDSLHEHIANLAGSPAIKKGILQTVKVVDELVKVMGRHKPENIVIEMARENQTTQKGQKNSRERMKRIEEGIKELGSQILKEHPVENTQLQNEKLYLYYLQNGRDMYVDQELDINRLSDYDVDAIVPQSFLKDDSIDNKVLTRSDKNRGKSDNVPSEEVVKKMKNYWRQLLNAKLITQRKFDNLTKAERGGLSELDKAGFIKRQLVETRQITKHVAQILDSRMNTKYDENDKLIREVKVITLKSKLVSDFRKDFQFYKVREINNYHHAHDAYLNAVVGTALIKKYPKLESEFVYGDYKVYDVRKMIAKSEQEIGKATAKYFFYSNIMNFFKTEITLANGEIRKRPLIETNGETGEIVWDKGRDFATVRKVLSMPQVNIVKKTEVQTGGFSKESILPKRNSDKLIARKKDWDPKKYGGFDSPTVAYSVLVVAKVEKGKSKKLKSVKELLGITIMERSSFEKNPIDFLEAKGYKEVKKDLIIKLPKYSLFELENGRKRMLASAGELQKGNELALPSKYVNFLYLASHYEKLKGSPEDNEQKQLFVEQHKHYLDEIIEQISEFSKRVILADANLDKVLSAYNKHRDKPIREQAENIIHLFTLTNLGAPAAFKYFDTTIDRKRYTSTKEVLDATLIHQSITGLYETRIDLSQLGGDSGGSSGGSSGSETPGTSESATPESSGGSSGGSSDKWKHKFELKENRWVYVPSEEYLKFGKKIHQYIRHKWKYPLYMYHLRDGGHIAAAKLHIKNDYFSLIDISDFFGSTSQSRVTDELKKLIPYAKAREIAKLSTVRIPNANGLKHAIPYGYPQSPILATLMAHNSYCGGVINTINKSGHVTVSVYMDDIILSSDDLGQLNQAFDTVCEALRKSRYEVNENKTQSPSTMINVFNLELSGNSLRVSPERMVQFIQAYVKSDNEHERKGIASYVHLVNPDQARLHFSGGSKRTADGSEFEPKKKRKV

SEQ ID NO: 1719 - protein, 1691 aa, synthetic construct
MKRTADGSEFESPKKKRKVDKKYSIGLDIGTNSVGWAVITDEYKVPSKKFKVLGNTDRHSIKKNLIGALLFDSGETAEATRLKRTARRRYTRRKNRICYLQEIFSNEMAKVDDSFFHRLEESFLVEEDKKHERHPIFGNIVDEVAYHEKYPTIYHLRKKLVDSTDKADLRLIYLALAHMIKFRGHFLIEGDLNPDNSDVDKLFIQLVQTYNQLFEENPINASGVDAKAILSARLSKSRRLENLIAQLPGEKKNGLFGNLIALSLGLTPNFKSNFDLAEDAKLQLSKDTYDDDLDNLLAQIGDQYADLFLAAKNLSDAILLSDILRVNTEITKAPLSASMIKRYDEHHQDLTLLKALVRQQLPEKYKEIFFDQSKNGYAGYIDGGASQEEFYKFIKPILEKMDGTEELLVKLNREDLLRKQRTFDNGSIPHQIHLGELHAILRRQEDFYPFLKDNREKIEKILTFRIPYYVGPLARGNSRFAWMTRKSEETITPWNFEEVVDKGASAQSFIERMTNFDKNLPNEKVLPKHSLLYEYFTVYNELTKVKYVTEGMRKPAFLSGEQKKAIVDLLFKTNRKVTVKQLKEDYFKKIECFDSVEISGVEDRFNASLGTYHDLLKIIKDKDFLDNEENEDILEDIVLTLTLFEDREMIEERLKTYAHLFDDKVMKQLKRRRYTGWGRLSRKLINGIRDKQSGKTILDFLKSDGFANRNFMQLIHDDSLTFKEDIQKAQVSGQGDSLHEHIANLAGSPAIKKGILQTVKVVDELVKVMGRHKPENIVIEMARENQTTQKGQKNSRERMKRIEEGIKELGSQILKEHPVENTQLQNEKLYLYYLQNGRDMYVDQELDINRLSDYDVDAIVPQSFLKDDSIDNKVLTRSDKNRGKSDNVPSEEVVKKMKNYWRQLLNAKLITQRKFDNLTKAERGGLSELDKAGFIKRQLVETRQITKHVAQILDSRMNTKYDENDKLIREVKVITLKSKLVSDFRKDFQFYKVREINNYHHAHDAYLNAVVGTALIKKYPKLESEFVYGDYKVYDVRKMIAKSEQEIGKATAKYFFYSNIMNFFKTEITLANGEIRKRPLIETNGETGEIVWDKGRDFATVRKVLSMPQVNIVKKTEVQTGGFSKESILPKRNSDKLIARKKDWDPKKYGGFDSPTVAYSVLVVAKVEKGKSKKLKSVKELLGITIMERSSFEKNPIDFLEAKGYKEVKKDLIIKLPKYSLFELENGRKRMLASAGELQKGNELALPSKYVNFLYLASHYEKLKGSPEDNEQKQLFVEQHKHYLDEIIEQISEFSKRVILADANLDKVLSAYNKHRDKPIREQAENIIHLFTLTNLGAPAAFKYFDTTIDRKRYTSTKEVLDATLIHQSITGLYETRIDLSQLGGDSGGSSGGSSGSETPGTSESATPESSGGSSGGSSDKWKHKNELKENRWVYVPSEEMLKFGKKIHQYIRHKWKYPLYMYHLRDGGHVAAAKLHIKNDYFSLIDISDFFGSTSQSRVTDELKKLIPYAKAREIAKLSTVRIPNANGLKHAIPYGYPQSPILATLMFHNSYCGGVINTINKSGHVTVSVYMDDIILSSDDLAQLNQAFDTVCEALRKSRYEVNENKTQSPSTMINVFNLELSHNSLRVSPERMVQFIQAYVKSDNEHERKGIASYVHSVNPDQARLHKSGGSKRTADGSEFEPKKKRKV

SEQ ID NO: 1720 - protein, 1691 aa, synthetic construct
MKRTADGSEFESPKKKRKVDKKYSIGLDIGTNSVGWAVITDEYKVPSKKFKVLGNTDRHSIKKNLIGALLFDSGETAEATRLKRTARRRYTRRKNRICYLQEIFSNEMAKVDDSFFHRLEESFLVEEDKKHERHPIFGNIVDEVAYHEKYPTIYHLRKKLVDSTDKADLRLIYLALAHMIKFRGHFLIEGDLNPDNSDVDKLFIQLVQTYNQLFEENPINASGVDAKAILSARLSKSRRLENLIAQLPGEKKNGLFGNLIALSLGLTPNFKSNFDLAEDAKLQLSKDTYDDDLDNLLAQIGDQYADLFLAAKNLSDAILLSDILRVNTEITKAPLSASMIKRYDEHHQDLTLLKALVRQQLPEKYKEIFFDQSKNGYAGYIDGGASQEEFYKFIKPILEKMDGTEELLVKLNREDLLRKQRTFDNGSIPHQIHLGELHAILRRQEDFYPFLKDNREKIEKILTFRIPYYVGPLARGNSRFAWMTRKSEETITPWNFEEVVDKGASAQSFIERMTNFDKNLPNEKVLPKHSLLYEYFTVYNELTKVKYVTEGMRKPAFLSGEQKKAIVDLLFKTNRKVTVKQLKEDYFKKIECFDSVEISGVEDRFNASLGTYHDLLKIIKDKDFLDNEENEDILEDIVLTLTLFEDREMIEERLKTYAHLFDDKVMKQLKRRRYTGWGRLSRKLINGIRDKQSGKTILDFLKSDGFANRNFMQLIHDDSLTFKEDIQKAQVSGQGDSLHEHIANLAGSPAIKKGILQTVKVVDELVKVMGRHKPENIVIEMARENQTTQKGQKNSRERMKRIEEGIKELGSQILKEHPVENTQLQNEKLYLYYLQNGRDMYVDQELDINRLSDYDVDAIVPQSFLKDDSIDNKVLTRSDKNRGKSDNVPSEEVVKKMKNYWRQLLNAKLITQRKFDNLTKAERGGLSELDKAGFIKRQLVETRQITKHVAQILDSRMNTKYDENDKLIREVKVITLKSKLVSDFRKDFQFYKVREINNYHHAHDAYLNAVVGTALIKKYPKLESEFVYGDYKVYDVRKMIAKSEQEIGKATAKYFFYSNIMNFFKTEITLANGEIRKRPLIETNGETGEIVWDKGRDFATVRKVLSMPQVNIVKKTEVQTGGFSKESILPKRNSDKLIARKKDWDPKKYGGFDSPTVAYSVLVVAKVEKGKSKKLKSVKELLGITIMERSSFEKNPIDFLEAKGYKEVKKDLIIKLPKYSLFELENGRKRMLASAGELQKGNELALPSKYVNFLYLASHYEKLKGSPEDNEQKQLFVEQHKHYLDEIIEQISEFSKRVILADANLDKVLSAYNKHRDKPIREQAENIIHLFTLTNLGAPAAFKYFDTTIDRKRYTSTKEVLDATLIHQSITGLYETRIDLSQLGGDSGGSSGGSSGSETPGTSESATPESSGGSSGGSSDKWKHKFELKENRWQAVPSEEMLKFGKKIHQYIRHKWKYPLYMYHLRDGGHVAAAKLHIKNDYFSLIDISDFFGSTSQSRVTDELKKLIPYAKAREIAKLSTVRIPNANGLKHAIPYGYPQSPILATLMFHNSYCGGVINTINKSGHVTVSVYMDDIILSSDDLAQLNQAFDTVCEALRKSRYEVNENKTQSPSTMINVFNLELSHNSLRVSPERMVQFIQAYVKSDNEHERKGIASYVHSVNPDQARLHFSGGSKRTADGSEFEPKKKRKV

SEQ ID NO: 1721 - protein, 1691 aa, synthetic construct
MKRTADGSEFESPKKKRKVDKKYSIGLDIGTNSVGWAVITDEYKVPSKKFKVLGNTDRHSIKKNLIGALLFDSGETAEATRLKRTARRRYTRRKNRICYLQEIFSNEMAKVDDSFFHRLEESFLVEEDKKHERHPIFGNIVDEVAYHEKYPTIYHLRKKLVDSTDKADLRLIYLALAHMIKFRGHFLIEGDLNPDNSDVDKLFIQLVQTYNQLFEENPINASGVDAKAILSARLSKSRRLENLIAQLPGEKKNGLFGNLIALSLGLTPNFKSNFDLAEDAKLQLSKDTYDDDLDNLLAQIGDQYADLFLAAKNLSDAILLSDILRVNTEITKAPLSASMIKRYDEHHQDLTLLKALVRQQLPEKYKEIFFDQSKNGYAGYIDGGASQEEFYKFIKPILEKMDGTEELLVKLNREDLLRKQRTFDNGSIPHQIHLGELHAILRRQEDFYPFLKDNREKIEKILTFRIPYYVGPLARGNSRFAWMTRKSEETITPWNFEEVVDKGASAQSFIERMTNFDKNLPNEKVLPKHSLLYEYFTVYNELTKVKYVTEGMRKPAFLSGEQKKAIVDLLFKTNRKVTVKQLKEDYFKKIECFDSVEISGVEDRFNASLGTYHDLLKIIKDKDFLDNEENEDILEDIVLTLTLFEDREMIEERLKTYAHLFDDKVMKQLKRRRYTGWGRLSRKLINGIRDKQSGKTILDFLKSDGFANRNFMQLIHDDSLTFKEDIQKAQVSGQGDSLHEHIANLAGSPAIKKGILQTVKVVDELVKVMGRHKPENIVIEMARENQTTQKGQKNSRERMKRIEEGIKELGSQILKEHPVENTQLQNEKLYLYYLQNGRDMYVDQELDINRLSDYDVDAIVPQSFLKDDSIDNKVLTRSDKNRGKSDNVPSEEVVKKMKNYWRQLLNAKLITQRKFDNLTKAERGGLSELDKAGFIKRQLVETRQITKHVAQILDSRMNTKYDENDKLIREVKVITLKSKLVSDFRKDFQFYKVREINNYHHAHDAYLNAVVGTALIKKYPKLESEFVYGDYKVYDVRKMIAKSEQEIGKATAKYFFYSNIMNFFKTEITLANGEIRKRPLIETNGETGEIVWDKGRDFATVRKVLSMPQVNIVKKTEVQTGGFSKESILPKRNSDKLIARKKDWDPKKYGGFDSPTVAYSVLVVAKVEKGKSKKLKSVKELLGITIMERSSFEKNPIDFLEAKGYKEVKKDLIIKLPKYSLFELENGRKRMLASAGELQKGNELALPSKYVNFLYLASHYEKLKGSPEDNEQKQLFVEQHKHYLDEIIEQISEFSKRVILADANLDKVLSAYNKHRDKPIREQAENIIHLFTLTNLGAPAAFKYFDTTIDRKRYTSTKEVLDATLIHQSITGLYETRIDLSQLGGDSGGSSGGSSGSETPGTSESATPESSGGSSGGSSDKWKHKFELKENRWQYVPSEEMLKFGKKIHQYIRHKWKYPLYMYHLRDGGHVAAAKLHIKNDYFSLIDISDFFGSTSQSRVTDELKKLIPYAKAREIAKLSTVRIPNANGLKHAIPYGYPQSPILATLMFHNSYCGGVINTINKSGHVTVSVYMDDIILSSDDLAQLNQAFDTVCEALRKSRYEVNENNTQSPSTMINVFNLELSHNSLRVSPERMVQFIQAYVKSDNEHERKGIASYVHSVNPDQARLHFSGGSKRTADGSEFEPKKKRKV

SEQ ID NO: 1722 - protein, 1691 aa, synthetic construct
MKRTADGSEFESPKKKRKVDKKYSIGLDIGTNSVGWAVITDEYKVPSKKFKVLGNTDRHSIKKNLIGALLFDSGETAEATRLKRTARRRYTRRKNRICYLQEIFSNEMAKVDDSFFHRLEESFLVEEDKKHERHPIFGNIVDEVAYHEKYPTIYHLRKKLVDSTDKADLRLIYLALAHMIKFRGHFLIEGDLNPDNSDVDKLFIQLVQTYNQLFEENPINASGVDAKAILSARLSKSRRLENLIAQLPGEKKNGLFGNLIALSLGLTPNFKSNFDLAEDAKLQLSKDTYDDDLDNLLAQIGDQYADLFLAAKNLSDAILLSDILRVNTEITKAPLSASMIKRYDEHHQDLTLLKALVRQQLPEKYKEIFFDQSKNGYAGYIDGGASQEEFYKFIKPILEKMDGTEELLVKLNREDLLRKQRTFDNGSIPHQIHLGELHAILRRQEDFYPFLKDNREKIEKILTFRIPYYVGPLARGNSRFAWMTRKSEETITPWNFEEVVDKGASAQSFIERMTNFDKNLPNEKVLPKHSLLYEYFTVYNELTKVKYVTEGMRKPAFLSGEQKKAIVDLLFKTNRKVTVKQLKEDYFKKIECFDSVEISGVEDRFNASLGTYHDLLKIIKDKDFLDNEENEDILEDIVLTLTLFEDREMIEERLKTYAHLFDDKVMKQLKRRRYTGWGRLSRKLINGIRDKQSGKTILDFLKSDGFANRNFMQLIHDDSLTFKEDIQKAQVSGQGDSLHEHIANLAGSPAIKKGILQTVKVVDELVKVMGRHKPENIVIEMARENQTTQKGQKNSRERMKRIEEGIKELGSQILKEHPVENTQLQNEKLYLYYLQNGRDMYVDQELDINRLSDYDVDAIVPQSFLKDDSIDNKVLTRSDKNRGKSDNVPSEEVVKKMKNYWRQLLNAKLITQRKFDNLTKAERGGLSELDKAGFIKRQLVETRQITKHVAQILDSRMNTKYDENDKLIREVKVITLKSKLVSDFRKDFQFYKVREINNYHHAHDAYLNAVVGTALIKKYPKLESEFVYGDYKVYDVRKMIAKSEQEIGKATAKYFFYSNIMNFFKTEITLANGEIRKRPLIETNGETGEIVWDKGRDFATVRKVLSMPQVNIVKKTEVQTGGFSKESILPKRNSDKLIARKKDWDPKKYGGFDSPTVAYSVLVVAKVEKGKSKKLKSVKELLGITIMERSSFEKNPIDFLEAKGYKEVKKDLIIKLPKYSLFELENGRKRMLASAGELQKGNELALPSKYVNFLYLASHYEKLKGSPEDNEQKQLFVEQHKHYLDEIIEQISEFSKRVILADANLDKVLSAYNKHRDKPIREQAENIIHLFTLTNLGAPAAFKYFDTTIDRKRYTSTKEVLDATLIHQSITGLYETRIDLSQLGGDSGGSSGGSSGSETPGTSESATPESSGGSSGGSSDKWKHKFELKENRWQYVPSEEMLKFGKKIHQYIRHKWKYPLYMYHLRDGGHVAAAKLHIKNDYFSLIDISDFFGSTSQSRVTDELKKLIPYAKAREIAKLSTVRIPNANGLKHAIPYGYPQSPILATLMFHNSYCGGVINTINKSGHVTVSVYMDDIILSSDDLAQLNQAFDTVCEALRKSRYEVNENKTQSPSTMINVWNLELSHNSLRVSPERMVQFIQAYVKSDNEHERKGIASYVHSVNPDQARLHFSGGSKRTADGSEFEPKKKRKV

SEQ ID NO: 1723 - protein, 1691 aa, synthetic construct
MKRTADGSEFESPKKKRKVDKKYSIGLDIGTNSVGWAVITDEYKVPSKKFKVLGNTDRHSIKKNLIGALLFDSGETAEATRLKRTARRRYTRRKNRICYLQEIFSNEMAKVDDSFFHRLEESFLVEEDKKHERHPIFGNIVDEVAYHEKYPTIYHLRKKLVDSTDKADLRLIYLALAHMIKFRGHFLIEGDLNPDNSDVDKLFIQLVQTYNQLFEENPINASGVDAKAILSARLSKSRRLENLIAQLPGEKKNGLFGNLIALSLGLTPNFKSNFDLAEDAKLQLSKDTYDDDLDNLLAQIGDQYADLFLAAKNLSDAILLSDILRVNTEITKAPLSASMIKRYDEHHQDLTLLKALVRQQLPEKYKEIFFDQSKNGYAGYIDGGASQEEFYKFIKPILEKMDGTEELLVKLNREDLLRKQRTFDNGSIPHQIHLGELHAILRRQEDFYPFLKDNREKIEKILTFRIPYYVGPLARGNSRFAWMTRKSEETITPWNFEEVVDKGASAQSFIERMTNFDKNLPNEKVLPKHSLLYEYFTVYNELTKVKYVTEGMRKPAFLSGEQKKAIVDLLFKTNRKVTVKQLKEDYFKKIECFDSVEISGVEDRFNASLGTYHDLLKIIKDKDFLDNEENEDILEDIVLTLTLFEDREMIEERLKTYAHLFDDKVMKQLKRRRYTGWGRLSRKLINGIRDKQSGKTILDFLKSDGFANRNFMQLIHDDSLTFKEDIQKAQVSGQGDSLHEHIANLAGSPAIKKGILQTVKVVDELVKVMGRHKPENIVIEMARENQTTQKGQKNSRERMKRIEEGIKELGSQILKEHPVENTQLQNEKLYLYYLQNGRDMYVDQELDINRLSDYDVDAIVPQSFLKDDSIDNKVLTRSDKNRGKSDNVPSEEVVKKMKNYWRQLLNAKLITQRKFDNLTKAERGGLSELDKAGFIKRQLVETRQITKHVAQILDSRMNTKYDENDKLIREVKVITLKSKLVSDFRKDFQFYKVREINNYHHAHDAYLNAVVGTALIKKYPKLESEFVYGDYKVYDVRKMIAKSEQEIGKATAKYFFYSNIMNFFKTEITLANGEIRKRPLIETNGETGEIVWDKGRDFATVRKVLSMPQVNIVKKTEVQTGGFSKESILPKRNSDKLIARKKDWDPKKYGGFDSPTVAYSVLVVAKVEKGKSKKLKSVKELLGITIMERSSFEKNPIDFLEAKGYKEVKKDLIIKLPKYSLFELENGRKRMLASAGELQKGNELALPSKYVNFLYLASHYEKLKGSPEDNEQKQLFVEQHKHYLDEIIEQISEFSKRVILADANLDKVLSAYNKHRDKPIREQAENIIHLFTLTNLGAPAAFKYFDTTIDRKRYTSTKEVLDATLIHQSITGLYETRIDLSQLGGDSGGSSGGSSGSETPGTSESATPESSGGSSGGSSDKWKHKFELKENRWQYVPSEEMLKFGKKIHQYIRHKWKYPLYMYHLRDGGHVAAAKLHIKNDYFSLIDISDFFGSTSQSRVTDELKKLIPYAKAREIAKLSTVRIPNANGLKHAIPYGYPQSPILATLMFHNSYCGGVINTINKSGHVTVSVYMDDIILSSDDLAQLNQAFDTVCEALRKSRYEVNENKTQSPSTMINVFNLELSHNSLRVSPERMVQFIQAYVKSDNEHERKGIASYVHSVNPDQARLHKSGGSKRTADGSEFEPKKKRKV

SEQ ID NO: 1724 - protein, 1691 aa, synthetic construct
MKRTADGSEFESPKKKRKVDKKYSIGLDIGTNSVGWAVITDEYKVPSKKFKVLGNTDRHSIKKNLIGALLFDSGETAEATRLKRTARRRYTRRKNRICYLQEIFSNEMAKVDDSFFHRLEESFLVEEDKKHERHPIFGNIVDEVAYHEKYPTIYHLRKKLVDSTDKADLRLIYLALAHMIKFRGHFLIEGDLNPDNSDVDKLFIQLVQTYNQLFEENPINASGVDAKAILSARLSKSRRLENLIAQLPGEKKNGLFGNLIALSLGLTPNFKSNFDLAEDAKLQLSKDTYDDDLDNLLAQIGDQYADLFLAAKNLSDAILLSDILRVNTEITKAPLSASMIKRYDEHHQDLTLLKALVRQQLPEKYKEIFFDQSKNGYAGYIDGGASQEEFYKFIKPILEKMDGTEELLVKLNREDLLRKQRTFDNGSIPHQIHLGELHAILRRQEDFYPFLKDNREKIEKILTFRIPYYVGPLARGNSRFAWMTRKSEETITPWNFEEVVDKGASAQSFIERMTNFDKNLPNEKVLPKHSLLYEYFTVYNELTKVKYVTEGMRKPAFLSGEQKKAIVDLLFKTNRKVTVKQLKEDYFKKIECFDSVEISGVEDRFNASLGTYHDLLKIIKDKDFLDNEENEDILEDIVLTLTLFEDREMIEERLKTYAHLFDDKVMKQLKRRRYTGWGRLSRKLINGIRDKQSGKTILDFLKSDGFANRNFMQLIHDDSLTFKEDIQKAQVSGQGDSLHEHIANLAGSPAIKKGILQTVKVVDELVKVMGRHKPENIVIEMARENQTTQKGQKNSRERMKRIEEGIKELGSQILKEHPVENTQLQNEKLYLYYLQNGRDMYVDQELDINRLSDYDVDAIVPQSFLKDDSIDNKVLTRSDKNRGKSDNVPSEEVVKKMKNYWRQLLNAKLITQRKFDNLTKAERGGLSELDKAGFIKRQLVETRQITKHVAQILDSRMNTKYDENDKLIREVKVITLKSKLVSDFRKDFQFYKVREINNYHHAHDAYLNAVVGTALIKKYPKLESEFVYGDYKVYDVRKMIAKSEQEIGKATAKYFFYSNIMNFFKTEITLANGEIRKRPLIETNGETGEIVWDKGRDFATVRKVLSMPQVNIVKKTEVQTGGFSKESILPKRNSDKLIARKKDWDPKKYGGFDSPTVAYSVLVVAKVEKGKSKKLKSVKELLGITIMERSSFEKNPIDFLEAKGYKEVKKDLIIKLPKYSLFELENGRKRMLASAGELQKGNELALPSKYVNFLYLASHYEKLKGSPEDNEQKQLFVEQHKHYLDEIIEQISEFSKRVILADANLDKVLSAYNKHRDKPIREQAENIIHLFTLTNLGAPAAFKYFDTTIDRKRYTSTKEVLDATLIHQSITGLYETRIDLSQLGGDSGGSSGGSSGSETPGTSESATPESSGGSSGGSSDKWKHKFELKENRWVAVPSEEMLKFGKKIHQYIRHKWKYPLYMYHLRDGGHVAAAKLHIKNDYFSLIDISDFFGSTSQSRVTDELKKLIPYAKAREIAKLSTVRIPNANGLKHAIPYGYPQSPILATLMFHNSYCGGVINTINKSGHVTVSVYMDDIILSSDDLAQLNQAFDTVCEALRKSRYEVNENNTQSPSTMINVFNLELSHNSLRVSPERMVQFIQAYVKSDNEHERKGIASYVHSVNPDQARLHFSGGSKRTADGSEFEPKKKRKV

SEQ ID NO: 1725 - protein, 1691 aa, synthetic construct
MKRTADGSEFESPKKKRKVDKKYSIGLDIGTNSVGWAVITDEYKVPSKKFKVLGNTDRHSIKKNLIGALLFDSGETAEATRLKRTARRRYTRRKNRICYLQEIFSNEMAKVDDSFFHRLEESFLVEEDKKHERHPIFGNIVDEVAYHEKYPTIYHLRKKLVDSTDKADLRLIYLALAHMIKFRGHFLIEGDLNPDNSDVDKLFIQLVQTYNQLFEENPINASGVDAKAILSARLSKSRRLENLIAQLPGEKKNGLFGNLIALSLGLTPNFKSNFDLAEDAKLQLSKDTYDDDLDNLLAQIGDQYADLFLAAKNLSDAILLSDILRVNTEITKAPLSASMIKRYDEHHQDLTLLKALVRQQLPEKYKEIFFDQSKNGYAGYIDGGASQEEFYKFIKPILEKMDGTEELLVKLNREDLLRKQRTFDNGSIPHQIHLGELHAILRRQEDFYPFLKDNREKIEKILTFRIPYYVGPLARGNSRFAWMTRKSEETITPWNFEEVVDKGASAQSFIERMTNFDKNLPNEKVLPKHSLLYEYFTVYNELTKVKYVTEGMRKPAFLSGEQKKAIVDLLFKTNRKVTVKQLKEDYFKKIECFDSVEISGVEDRFNASLGTYHDLLKIIKDKDFLDNEENEDILEDIVLTLTLFEDREMIEERLKTYAHLFDDKVMKQLKRRRYTGWGRLSRKLINGIRDKQSGKTILDFLKSDGFANRNFMQLIHDDSLTFKEDIQKAQVSGQGDSLHEHIANLAGSPAIKKGILQTVKVVDELVKVMGRHKPENIVIEMARENQTTQKGQKNSRERMKRIEEGIKELGSQILKEHPVENTQLQNEKLYLYYLQNGRDMYVDQELDINRLSDYDVDAIVPQSFLKDDSIDNKVLTRSDKNRGKSDNVPSEEVVKKMKNYWRQLLNAKLITQRKFDNLTKAERGGLSELDKAGFIKRQLVETRQITKHVAQILDSRMNTKYDENDKLIREVKVITLKSKLVSDFRKDFQFYKVREINNYHHAHDAYLNAVVGTALIKKYPKLESEFVYGDYKVYDVRKMIAKSEQEIGKATAKYFFYSNIMNFFKTEITLANGEIRKRPLIETNGETGEIVWDKGRDFATVRKVLSMPQVNIVKKTEVQTGGFSKESILPKRNSDKLIARKKDWDPKKYGGFDSPTVAYSVLVVAKVEKGKSKKLKSVKELLGITIMERSSFEKNPIDFLEAKGYKEVKKDLIIKLPKYSLFELENGRKRMLASAGELQKGNELALPSKYVNFLYLASHYEKLKGSPEDNEQKQLFVEQHKHYLDEIIEQISEFSKRVILADANLDKVLSAYNKHRDKPIREQAENIIHLFTLTNLGAPAAFKYFDTTIDRKRYTSTKEVLDATLIHQSITGLYETRIDLSQLGGDSGGSSGGSSGSETPGTSESATPESSGGSSGGSSDKWKHKFELKENRWVAVPSEEMLKFGKKIHQYIRHKWKYPLYMYHLRDGGHVAAAKLHIKNDYFSLIDISDFFGSTSQSRVTDELKKLIPYAKAREIAKLSTVRIPNANGLKHAIPYGYPQSPILATLMFHNSYCGGVINTINKSGHVTVSVYMDDIILSSDDLAQLNQAFDTVCEALRKSRYEVNENKTQSPSTMINVWNLELSHNSLRVSPERMVQFIQAYVKSDNEHERKGIASYVHSVNPDQARLHFSGGSKRTADGSEFEPKKKRKV

SEQ ID NO: 1726 - protein, 1691 aa, synthetic construct
MKRTADGSEFESPKKKRKVDKKYSIGLDIGTNSVGWAVITDEYKVPSKKFKVLGNTDRHSIKKNLIGALLFDSGETAEATRLKRTARRRYTRRKNRICYLQEIFSNEMAKVDDSFFHRLEESFLVEEDKKHERHPIFGNIVDEVAYHEKYPTIYHLRKKLVDSTDKADLRLIYLALAHMIKFRGHFLIEGDLNPDNSDVDKLFIQLVQTYNQLFEENPINASGVDAKAILSARLSKSRRLENLIAQLPGEKKNGLFGNLIALSLGLTPNFKSNFDLAEDAKLQLSKDTYDDDLDNLLAQIGDQYADLFLAAKNLSDAILLSDILRVNTEITKAPLSASMIKRYDEHHQDLTLLKALVRQQLPEKYKEIFFDQSKNGYAGYIDGGASQEEFYKFIKPILEKMDGTEELLVKLNREDLLRKQRTFDNGSIPHQIHLGELHAILRRQEDFYPFLKDNREKIEKILTFRIPYYVGPLARGNSRFAWMTRKSEETITPWNFEEVVDKGASAQSFIERMTNFDKNLPNEKVLPKHSLLYEYFTVYNELTKVKYVTEGMRKPAFLSGEQKKAIVDLLFKTNRKVTVKQLKEDYFKKIECFDSVEISGVEDRFNASLGTYHDLLKIIKDKDFLDNEENEDILEDIVLTLTLFEDREMIEERLKTYAHLFDDKVMKQLKRRRYTGWGRLSRKLINGIRDKQSGKTILDFLKSDGFANRNFMQLIHDDSLTFKEDIQKAQVSGQGDSLHEHIANLAGSPAIKKGILQTVKVVDELVKVMGRHKPENIVIEMARENQTTQKGQKNSRERMKRIEEGIKELGSQILKEHPVENTQLQNEKLYLYYLQNGRDMYVDQELDINRLSDYDVDAIVPQSFLKDDSIDNKVLTRSDKNRGKSDNVPSEEVVKKMKNYWRQLLNAKLITQRKFDNLTKAERGGLSELDKAGFIKRQLVETRQITKHVAQILDSRMNTKYDENDKLIREVKVITLKSKLVSDFRKDFQFYKVREINNYHHAHDAYLNAVVGTALIKKYPKLESEFVYGDYKVYDVRKMIAKSEQEIGKATAKYFFYSNIMNFFKTEITLANGEIRKRPLIETNGETGEIVWDKGRDFATVRKVLSMPQVNIVKKTEVQTGGFSKESILPKRNSDKLIARKKDWDPKKYGGFDSPTVAYSVLVVAKVEKGKSKKLKSVKELLGITIMERSSFEKNPIDFLEAKGYKEVKKDLIIKLPKYSLFELENGRKRMLASAGELQKGNELALPSKYVNFLYLASHYEKLKGSPEDNEQKQLFVEQHKHYLDEIIEQISEFSKRVILADANLDKVLSAYNKHRDKPIREQAENIIHLFTLTNLGAPAAFKYFDTTIDRKRYTSTKEVLDATLIHQSITGLYETRIDLSQLGGDSGGSSGGSSGSETPGTSESATPESSGGSSGGSSDKWKHKFELKENRWVAVPSEEMLKFGKKIHQYIRHKWKYPLYMYHLRDGGHVAAAKLHIKNDYFSLIDISDFFGSTSQSRVTDELKKLIPYAKAREIAKLSTVRIPNANGLKHAIPYGYPQSPILATLMFHNSYCGGVINTINKSGHVTVSVYMDDIILSSDDLAQLNQAFDTVCEALRKSRYEVNENKTQSPSTMINVFNLELSHNSLRVSPERMVQFIQAYVKSDNEHERKGIASYVHSVNPDQARLHKSGGSKRTADGSEFEPKKKRKV

SEQ ID NO: 1727 - protein, 1691 aa, synthetic construct
MKRTADGSEFESPKKKRKVDKKYSIGLDIGTNSVGWAVITDEYKVPSKKFKVLGNTDRHSIKKNLIGALLFDSGETAEATRLKRTARRRYTRRKNRICYLQEIFSNEMAKVDDSFFHRLEESFLVEEDKKHERHPIFGNIVDEVAYHEKYPTIYHLRKKLVDSTDKADLRLIYLALAHMIKFRGHFLIEGDLNPDNSDVDKLFIQLVQTYNQLFEENPINASGVDAKAILSARLSKSRRLENLIAQLPGEKKNGLFGNLIALSLGLTPNFKSNFDLAEDAKLQLSKDTYDDDLDNLLAQIGDQYADLFLAAKNLSDAILLSDILRVNTEITKAPLSASMIKRYDEHHQDLTLLKALVRQQLPEKYKEIFFDQSKNGYAGYIDGGASQEEFYKFIKPILEKMDGTEELLVKLNREDLLRKQRTFDNGSIPHQIHLGELHAILRRQEDFYPFLKDNREKIEKILTFRIPYYVGPLARGNSRFAWMTRKSEETITPWNFEEVVDKGASAQSFIERMTNFDKNLPNEKVLPKHSLLYEYFTVYNELTKVKYVTEGMRKPAFLSGEQKKAIVDLLFKTNRKVTVKQLKEDYFKKIECFDSVEISGVEDRFNASLGTYHDLLKIIKDKDFLDNEENEDILEDIVLTLTLFEDREMIEERLKTYAHLFDDKVMKQLKRRRYTGWGRLSRKLINGIRDKQSGKTILDFLKSDGFANRNFMQLIHDDSLTFKEDIQKAQVSGQGDSLHEHIANLAGSPAIKKGILQTVKVVDELVKVMGRHKPENIVIEMARENQTTQKGQKNSRERMKRIEEGIKELGSQILKEHPVENTQLQNEKLYLYYLQNGRDMYVDQELDINRLSDYDVDAIVPQSFLKDDSIDNKVLTRSDKNRGKSDNVPSEEVVKKMKNYWRQLLNAKLITQRKFDNLTKAERGGLSELDKAGFIKRQLVETRQITKHVAQILDSRMNTKYDENDKLIREVKVITLKSKLVSDFRKDFQFYKVREINNYHHAHDAYLNAVVGTALIKKYPKLESEFVYGDYKVYDVRKMIAKSEQEIGKATAKYFFYSNIMNFFKTEITLANGEIRKRPLIETNGETGEIVWDKGRDFATVRKVLSMPQVNIVKKTEVQTGGFSKESILPKRNSDKLIARKKDWDPKKYGGFDSPTVAYSVLVVAKVEKGKSKKLKSVKELLGITIMERSSFEKNPIDFLEAKGYKEVKKDLIIKLPKYSLFELENGRKRMLASAGELQKGNELALPSKYVNFLYLASHYEKLKGSPEDNEQKQLFVEQHKHYLDEIIEQISEFSKRVILADANLDKVLSAYNKHRDKPIREQAENIIHLFTLTNLGAPAAFKYFDTTIDRKRYTSTKEVLDATLIHQSITGLYETRIDLSQLGGDSGGSSGGSSGSETPGTSESATPESSGGSSGGSSDKWKHKFELKENRWVYVPSEEMLKFGKKIHQYIRHKWKYPLYMYHLRDGGHVAAAKLHIKNDYFSLIDISDFFGSTSQSRVTDELKKLIPYAKAREIAKLSTVRIPNANGLKHAIPYGYPQSPILATLMFHNSYCGGVINTINKSGHVTVSVYMDDIILSSDDLAQLNQAFDTVCEALRKSRYEVNENNTQSPSTMINVWNLELSHNSLRVSPERMVQFIQAYVKSDNEHERKGIASYVHSVNPDQARLHFSGGSKRTADGSEFEPKKKRKV

SEQ ID NO: 1728 - protein, 1691 aa, synthetic construct
MKRTADGSEFESPKKKRKVDKKYSIGLDIGTNSVGWAVITDEYKVPSKKFKVLGNTDRHSIKKNLIGALLFDSGETAEATRLKRTARRRYTRRKNRICYLQEIFSNEMAKVDDSFFHRLEESFLVEEDKKHERHPIFGNIVDEVAYHEKYPTIYHLRKKLVDSTDKADLRLIYLALAHMIKFRGHFLIEGDLNPDNSDVDKLFIQLVQTYNQLFEENPINASGVDAKAILSARLSKSRRLENLIAQLPGEKKNGLFGNLIALSLGLTPNFKSNFDLAEDAKLQLSKDTYDDDLDNLLAQIGDQYADLFLAAKNLSDAILLSDILRVNTEITKAPLSASMIKRYDEHHQDLTLLKALVRQQLPEKYKEIFFDQSKNGYAGYIDGGASQEEFYKFIKPILEKMDGTEELLVKLNREDLLRKQRTFDNGSIPHQIHLGELHAILRRQEDFYPFLKDNREKIEKILTFRIPYYVGPLARGNSRFAWMTRKSEETITPWNFEEVVDKGASAQSFIERMTNFDKNLPNEKVLPKHSLLYEYFTVYNELTKVKYVTEGMRKPAFLSGEQKKAIVDLLFKTNRKVTVKQLKEDYFKKIECFDSVEISGVEDRFNASLGTYHDLLKIIKDKDFLDNEENEDILEDIVLTLTLFEDREMIEERLKTYAHLFDDKVMKQLKRRRYTGWGRLSRKLINGIRDKQSGKTILDFLKSDGFANRNFMQLIHDDSLTFKEDIQKAQVSGQGDSLHEHIANLAGSPAIKKGILQTVKVVDELVKVMGRHKPENIVIEMARENQTTQKGQKNSRERMKRIEEGIKELGSQILKEHPVENTQLQNEKLYLYYLQNGRDMYVDQELDINRLSDYDVDAIVPQSFLKDDSIDNKVLTRSDKNRGKSDNVPSEEVVKKMKNYWRQLLNAKLITQRKFDNLTKAERGGLSELDKAGFIKRQLVETRQITKHVAQILDSRMNTKYDENDKLIREVKVITLKSKLVSDFRKDFQFYKVREINNYHHAHDAYLNAVVGTALIKKYPKLESEFVYGDYKVYDVRKMIAKSEQEIGKATAKYFFYSNIMNFFKTEITLANGEIRKRPLIETNGETGEIVWDKGRDFATVRKVLSMPQVNIVKKTEVQTGGFSKESILPKRNSDKLIARKKDWDPKKYGGFDSPTVAYSVLVVAKVEKGKSKKLKSVKELLGITIMERSSFEKNPIDFLEAKGYKEVKKDLIIKLPKYSLFELENGRKRMLASAGELQKGNELALPSKYVNFLYLASHYEKLKGSPEDNEQKQLFVEQHKHYLDEIIEQISEFSKRVILADANLDKVLSAYNKHRDKPIREQAENIIHLFTLTNLGAPAAFKYFDTTIDRKRYTSTKEVLDATLIHQSITGLYETRIDLSQLGGDSGGSSGGSSGSETPGTSESATPESSGGSSGGSSDKWKHKFELKENRWVYVPSEEMLKFGKKIHQYIRHKWKYPLYMYHLRDGGHVAAAKLHIKNDYFSLIDISDFFGSTSQSRVTDELKKLIPYAKAREIAKLSTVRIPNANGLKHAIPYGYPQSPILATLMFHNSYCGGVINTINKSGHVTVSVYMDDIILSSDDLAQLNQAFDTVCEALRKSRYEVNENNTQSPSTMINVFNLELSHNSLRVSPERMVQFIQAYVKSDNEHERKGIASYVHSVNPDQARLHKSGGSKRTADGSEFEPKKKRKV

SEQ ID NO: 1729 - protein, 1691 aa, synthetic construct
MKRTADGSEFESPKKKRKVDKKYSIGLDIGTNSVGWAVITDEYKVPSKKFKVLGNTDRHSIKKNLIGALLFDSGETAEATRLKRTARRRYTRRKNRICYLQEIFSNEMAKVDDSFFHRLEESFLVEEDKKHERHPIFGNIVDEVAYHEKYPTIYHLRKKLVDSTDKADLRLIYLALAHMIKFRGHFLIEGDLNPDNSDVDKLFIQLVQTYNQLFEENPINASGVDAKAILSARLSKSRRLENLIAQLPGEKKNGLFGNLIALSLGLTPNFKSNFDLAEDAKLQLSKDTYDDDLDNLLAQIGDQYADLFLAAKNLSDAILLSDILRVNTEITKAPLSASMIKRYDEHHQDLTLLKALVRQQLPEKYKEIFFDQSKNGYAGYIDGGASQEEFYKFIKPILEKMDGTEELLVKLNREDLLRKQRTFDNGSIPHQIHLGELHAILRRQEDFYPFLKDNREKIEKILTFRIPYYVGPLARGNSRFAWMTRKSEETITPWNFEEVVDKGASAQSFIERMTNFDKNLPNEKVLPKHSLLYEYFTVYNELTKVKYVTEGMRKPAFLSGEQKKAIVDLLFKTNRKVTVKQLKEDYFKKIECFDSVEISGVEDRFNASLGTYHDLLKIIKDKDFLDNEENEDILEDIVLTLTLFEDREMIEERLKTYAHLFDDKVMKQLKRRRYTGWGRLSRKLINGIRDKQSGKTILDFLKSDGFANRNFMQLIHDDSLTFKEDIQKAQVSGQGDSLHEHIANLAGSPAIKKGILQTVKVVDELVKVMGRHKPENIVIEMARENQTTQKGQKNSRERMKRIEEGIKELGSQILKEHPVENTQLQNEKLYLYYLQNGRDMYVDQELDINRLSDYDVDAIVPQSFLKDDSIDNKVLTRSDKNRGKSDNVPSEEVVKKMKNYWRQLLNAKLITQRKFDNLTKAERGGLSELDKAGFIKRQLVETRQITKHVAQILDSRMNTKYDENDKLIREVKVITLKSKLVSDFRKDFQFYKVREINNYHHAHDAYLNAVVGTALIKKYPKLESEFVYGDYKVYDVRKMIAKSEQEIGKATAKYFFYSNIMNFFKTEITLANGEIRKRPLIETNGETGEIVWDKGRDFATVRKVLSMPQVNIVKKTEVQTGGFSKESILPKRNSDKLIARKKDWDPKKYGGFDSPTVAYSVLVVAKVEKGKSKKLKSVKELLGITIMERSSFEKNPIDFLEAKGYKEVKKDLIIKLPKYSLFELENGRKRMLASAGELQKGNELALPSKYVNFLYLASHYEKLKGSPEDNEQKQLFVEQHKHYLDEIIEQISEFSKRVILADANLDKVLSAYNKHRDKPIREQAENIIHLFTLTNLGAPAAFKYFDTTIDRKRYTSTKEVLDATLIHQSITGLYETRIDLSQLGGDSGGSSGGSSGSETPGTSESATPESSGGSSGGSSDKWKHKFELKENRWVYVPSEEMLKFGKKIHQYIRHKWKQPLYMYHLRDGGHVAAAKMHIKNDYFSLIDISDFFGSTSQSRVTDELKKLIPYVKAREIAKLSTVRIPNANGLKHAIPYGYPQSPILATLMFHNSYCGGVINTINKSGHVTVSVYMDDIILSSDDLAQLNQAFDTVCEALRKSRYEVNENKTQSPSTMINVFNLELSGNSLRVSPERMVQFIQAYVKSDNEHERKGIASYVHSVNPDYARLHESGGSKRTADGSEFEPKKKRKV

SEQ ID NO: 1730 - protein, 1691 aa, synthetic construct
MKRTADGSEFESPKKKRKVDKKYSIGLDIGTNSVGWAVITDEYKVPSKKFKVLGNTDRHSIKKNLIGALLFDSGETAEATRLKRTARRRYTRRKNRICYLQEIFSNEMAKVDDSFFHRLEESFLVEEDKKHERHPIFGNIVDEVAYHEKYPTIYHLRKKLVDSTDKADLRLIYLALAHMIKFRGHFLIEGDLNPDNSDVDKLFIQLVQTYNQLFEENPINASGVDAKAILSARLSKSRRLENLIAQLPGEKKNGLFGNLIALSLGLTPNFKSNFDLAEDAKLQLSKDTYDDDLDNLLAQIGDQYADLFLAAKNLSDAILLSDILRVNTEITKAPLSASMIKRYDEHHQDLTLLKALVRQQLPEKYKEIFFDQSKNGYAGYIDGGASQEEFYKFIKPILEKMDGTEELLVKLNREDLLRKQRTFDNGSIPHQIHLGELHAILRRQEDFYPFLKDNREKIEKILTFRIPYYVGPLARGNSRFAWMTRKSEETITPWNFEEVVDKGASAQSFIERMTNFDKNLPNEKVLPKHSLLYEYFTVYNELTKVKYVTEGMRKPAFLSGEQKKAIVDLLFKTNRKVTVKQLKEDYFKKIECFDSVEISGVEDRFNASLGTYHDLLKIIKDKDFLDNEENEDILEDIVLTLTLFEDREMIEERLKTYAHLFDDKVMKQLKRRRYTGWGRLSRKLINGIRDKQSGKTILDFLKSDGFANRNFMQLIHDDSLTFKEDIQKAQVSGQGDSLHEHIANLAGSPAIKKGILQTVKVVDELVKVMGRHKPENIVIEMARENQTTQKGQKNSRERMKRIEEGIKELGSQILKEHPVENTQLQNEKLYLYYLQNGRDMYVDQELDINRLSDYDVDAIVPQSFLKDDSIDNKVLTRSDKNRGKSDNVPSEEVVKKMKNYWRQLLNAKLITQRKFDNLTKAERGGLSELDKAGFIKRQLVETRQITKHVAQILDSRMNTKYDENDKLIREVKVITLKSKLVSDFRKDFQFYKVREINNYHHAHDAYLNAVVGTALIKKYPKLESEFVYGDYKVYDVRKMIAKSEQEIGKATAKYFFYSNIMNFFKTEITLANGEIRKRPLIETNGETGEIVWDKGRDFATVRKVLSMPQVNIVKKTEVQTGGFSKESILPKRNSDKLIARKKDWDPKKYGGFDSPTVAYSVLVVAKVEKGKSKKLKSVKELLGITIMERSSFEKNPIDFLEAKGYKEVKKDLIIKLPKYSLFELENGRKRMLASAGELQKGNELALPSKYVNFLYLASHYEKLKGSPEDNEQKQLFVEQHKHYLDEIIEQISEFSKRVILADANLDKVLSAYNKHRDKPIREQAENIIHLFTLTNLGAPAAFKYFDTTIDRKRYTSTKEVLDATLIHQSITGLYETRIDLSQLGGDSGGSSGGSSGSETPGTSESATPESSGGSSGGSSDKWKHKFELKENRWVYVPSEEMLKFGKKIHQYIRHKWKYPLYMYHLRDGGHVAAAKLHIKNDYFSLIDISDFFGSTSQSRVTDELKKLIPYAKAREIAKLSTVRIPNANGLKHAIPYGYPQSPILATLMFHNSYCGGVINTINKSGHVTVSVYMDDIILSSDDLAQLNQAFDTVCEALRKSRYEVNENKTQSPSTMINVWNLELSHNSLRVSPERMVQFIQAYVKSDNEHERKGIASYVHSVNPDQARLHKSGGSKRTADGSEFEPKKKRKV

SEQ ID NO: 1731 - protein, 1691 aa, synthetic construct
MKRTADGSEFESPKKKRKVDKKYSIGLDIGTNSVGWAVITDEYKVPSKKFKVLGNTDRHSIKKNLIGALLFDSGETAEATRLKRTARRRYTRRKNRICYLQEIFSNEMAKVDDSFFHRLEESFLVEEDKKHERHPIFGNIVDEVAYHEKYPTIYHLRKKLVDSTDKADLRLIYLALAHMIKFRGHFLIEGDLNPDNSDVDKLFIQLVQTYNQLFEENPINASGVDAKAILSARLSKSRRLENLIAQLPGEKKNGLFGNLIALSLGLTPNFKSNFDLAEDAKLQLSKDTYDDDLDNLLAQIGDQYADLFLAAKNLSDAILLSDILRVNTEITKAPLSASMIKRYDEHHQDLTLLKALVRQQLPEKYKEIFFDQSKNGYAGYIDGGASQEEFYKFIKPILEKMDGTEELLVKLNREDLLRKQRTFDNGSIPHQIHLGELHAILRRQEDFYPFLKDNREKIEKILTFRIPYYVGPLARGNSRFAWMTRKSEETITPWNFEEVVDKGASAQSFIERMTNFDKNLPNEKVLPKHSLLYEYFTVYNELTKVKYVTEGMRKPAFLSGEQKKAIVDLLFKTNRKVTVKQLKEDYFKKIECFDSVEISGVEDRFNASLGTYHDLLKIIKDKDFLDNEENEDILEDIVLTLTLFEDREMIEERLKTYAHLFDDKVMKQLKRRRYTGWGRLSRKLINGIRDKQSGKTILDFLKSDGFANRNFMQLIHDDSLTFKEDIQKAQVSGQGDSLHEHIANLAGSPAIKKGILQTVKVVDELVKVMGRHKPENIVIEMARENQTTQKGQKNSRERMKRIEEGIKELGSQILKEHPVENTQLQNEKLYLYYLQNGRDMYVDQELDINRLSDYDVDAIVPQSFLKDDSIDNKVLTRSDKNRGKSDNVPSEEVVKKMKNYWRQLLNAKLITQRKFDNLTKAERGGLSELDKAGFIKRQLVETRQITKHVAQILDSRMNTKYDENDKLIREVKVITLKSKLVSDFRKDFQFYKVREINNYHHAHDAYLNAVVGTALIKKYPKLESEFVYGDYKVYDVRKMIAKSEQEIGKATAKYFFYSNIMNFFKTEITLANGEIRKRPLIETNGETGEIVWDKGRDFATVRKVLSMPQVNIVKKTEVQTGGFSKESILPKRNSDKLIARKKDWDPKKYGGFDSPTVAYSVLVVAKVEKGKSKKLKSVKELLGITIMERSSFEKNPIDFLEAKGYKEVKKDLIIKLPKYSLFELENGRKRMLASAGELQKGNELALPSKYVNFLYLASHYEKLKGSPEDNEQKQLFVEQHKHYLDEIIEQISEFSKRVILADANLDKVLSAYNKHRDKPIREQAENIIHLFTLTNLGAPAAFKYFDTTIDRKRYTSTKEVLDATLIHQSITGLYETRIDLSQLGGDSGGSSGGSSGSETPGTSESATPESSGGSSGGSSDKWKHKFELKENRWVYVPSEEMLKFGKKIHQYIRHKWKYPLYMYHLRDGGHVAAAKLHIKNDYFSLIDISDFFGSTSQSRVTDELKKLIPYAKAREIAKLSTVRIPNANGLKHAIPYGYPQSPILATLMFHNSYCGGIINTINKSGHVTVSVYMDDIILSSSDLAQLNQAQDTVCEALRKSRYEVNENKTQSPSTMINVFNLELSGNSLRVSPERMVRFIQAYVKSDNEHERKGIASYVHSVNPDQARLHFSGGSKRTADGSEFEPKKKRKV

SEQ ID NO: 1732 - protein, 1691 aa, synthetic construct
MKRTADGSEFESPKKKRKVDKKYSIGLDIGTNSVGWAVITDEYKVPSKKFKVLGNTDRHSIKKNLIGALLFDSGETAEATRLKRTARRRYTRRKNRICYLQEIFSNEMAKVDDSFFHRLEESFLVEEDKKHERHPIFGNIVDEVAYHEKYPTIYHLRKKLVDSTDKADLRLIYLALAHMIKFRGHFLIEGDLNPDNSDVDKLFIQLVQTYNQLFEENPINASGVDAKAILSARLSKSRRLENLIAQLPGEKKNGLFGNLIALSLGLTPNFKSNFDLAEDAKLQLSKDTYDDDLDNLLAQIGDQYADLFLAAKNLSDAILLSDILRVNTEITKAPLSASMIKRYDEHHQDLTLLKALVRQQLPEKYKEIFFDQSKNGYAGYIDGGASQEEFYKFIKPILEKMDGTEELLVKLNREDLLRKQRTFDNGSIPHQIHLGELHAILRRQEDFYPFLKDNREKIEKILTFRIPYYVGPLARGNSRFAWMTRKSEETITPWNFEEVVDKGASAQSFIERMTNFDKNLPNEKVLPKHSLLYEYFTVYNELTKVKYVTEGMRKPAFLSGEQKKAIVDLLFKTNRKVTVKQLKEDYFKKIECFDSVEISGVEDRFNASLGTYHDLLKIIKDKDFLDNEENEDILEDIVLTLTLFEDREMIEERLKTYAHLFDDKVMKQLKRRRYTGWGRLSRKLINGIRDKQSGKTILDFLKSDGFANRNFMQLIHDDSLTFKEDIQKAQVSGQGDSLHEHIANLAGSPAIKKGILQTVKVVDELVKVMGRHKPENIVIEMARENQTTQKGQKNSRERMKRIEEGIKELGSQILKEHPVENTQLQNEKLYLYYLQNGRDMYVDQELDINRLSDYDVDAIVPQSFLKDDSIDNKVLTRSDKNRGKSDNVPSEEVVKKMKNYWRQLLNAKLITQRKFDNLTKAERGGLSELDKAGFIKRQLVETRQITKHVAQILDSRMNTKYDENDKLIREVKVITLKSKLVSDFRKDFQFYKVREINNYHHAHDAYLNAVVGTALIKKYPKLESEFVYGDYKVYDVRKMIAKSEQEIGKATAKYFFYSNIMNFFKTEITLANGEIRKRPLIETNGETGEIVWDKGRDFATVRKVLSMPQVNIVKKTEVQTGGFSKESILPKRNSDKLIARKKDWDPKKYGGFDSPTVAYSVLVVAKVEKGKSKKLKSVKELLGITIMERSSFEKNPIDFLEAKGYKEVKKDLIIKLPKYSLFELENGRKRMLASAGELQKGNELALPSKYVNFLYLASHYEKLKGSPEDNEQKQLFVEQHKHYLDEIIEQISEFSKRVILADANLDKVLSAYNKHRDKPIREQAENIIHLFTLTNLGAPAAFKYFDTTIDRKRYTSTKEVLDATLIHQSITGLYETRIDLSQLGGDSGGSSGGSSGSETPGTSESATPESSGGSSGGSSDKWKHKFELKENRWVYVPSEEMLKFGKKIHQYIRHKWKYPLYMYHLRDGGHVAAAKLHIKGDYFSLIDVSDFFGSTSQSRVTDELKKLIPYAKAREIAKLSTVRIPNANGLKHAIPYGYPQSPILATLMFHNSYCGGVINTINKSGHVTVSVYMDDIILSSDDLAQLNQAFDTVCEALRASRYEVNENKTQSPSTMITVFNLELSGNSLRVSPERMVQFIQAYVKSDNEHERKGIASYVHSVNPDQARLHFSGGSKRTADGSEFEPKKKRKV

SEQ ID NO: 1733 - protein, 1694 aa, synthetic construct
MKRTADGSEFESPKKKRKVDKKYSIGLDIGTNSVGWAVITDEYKVPSKKFKVLGNTDRHSIKKNLIGALLFDSGETAEATRLKRTARRRYTRRKNRICYLQEIFSNEMAKVDDSFFHRLEESFLVEEDKKHERHPIFGNIVDEVAYHEKYPTIYHLRKKLVDSTDKADLRLIYLALAHMIKFRGHFLIEGDLNPDNSDVDKLFIQLVQTYNQLFEENPINASGVDAKAILSARLSKSRRLENLIAQLPGEKKNGLFGNLIALSLGLTPNFKSNFDLAEDAKLQLSKDTYDDDLDNLLAQIGDQYADLFLAAKNLSDAILLSDILRVNTEITKAPLSASMIKRYDEHHQDLTLLKALVRQQLPEKYKEIFFDQSKNGYAGYIDGGASQEEFYKFIKPILEKMDGTEELLVKLNREDLLRKQRTFDNGSIPHQIHLGELHAILRRQEDFYPFLKDNREKIEKILTFRIPYYVGPLARGNSRFAWMTRKSEETITPWNFEEVVDKGASAQSFIERMTNFDKNLPNEKVLPKHSLLYEYFTVYNELTKVKYVTEGMRKPAFLSGEQKKAIVDLLFKTNRKVTVKQLKEDYFKKIECFDSVEISGVEDRFNASLGTYHDLLKIIKDKDFLDNEENEDILEDIVLTLTLFEDREMIEERLKTYAHLFDDKVMKQLKRRRYTGWGRLSRKLINGIRDKQSGKTILDFLKSDGFANRNFMQLIHDDSLTFKEDIQKAQVSGQGDSLHEHIANLAGSPAIKKGILQTVKVVDELVKVMGRHKPENIVIEMARENQTTQKGQKNSRERMKRIEEGIKELGSQILKEHPVENTQLQNEKLYLYYLQNGRDMYVDQELDINRLSDYDVDAIVPQSFLKDDSIDNKVLTRSDKNRGKSDNVPSEEVVKKMKNYWRQLLNAKLITQRKFDNLTKAERGGLSELDKAGFIKRQLVETRQITKHVAQILDSRMNTKYDENDKLIREVKVITLKSKLVSDFRKDFQFYKVREINNYHHAHDAYLNAVVGTALIKKYPKLESEFVYGDYKVYDVRKMIAKSEQEIGKATAKYFFYSNIMNFFKTEITLANGEIRKRPLIETNGETGEIVWDKGRDFATVRKVLSMPQVNIVKKTEVQTGGFSKESILPKRNSDKLIARKKDWDPKKYGGFDSPTVAYSVLVVAKVEKGKSKKLKSVKELLGITIMERSSFEKNPIDFLEAKGYKEVKKDLIIKLPKYSLFELENGRKRMLASAGELQKGNELALPSKYVNFLYLASHYEKLKGSPEDNEQKQLFVEQHKHYLDEIIEQISEFSKRVILADANLDKVLSAYNKHRDKPIREQAENIIHLFTLTNLGAPAAFKYFDTTIDRKRYTSTKEVLDATLIHQSITGLYETRIDLSQLGGDSGGSSGGSSGSETPGTSESATPESSGGSSGGSSNTENEWLHKFEIKPGRWVYIPNEATLKQGKLIHAYIRSKWKSPPYMFHLREGGHVAAANHHVQKKYFALIDIQDFFGATSQSRITRALGNLIPYDKARKIAKLSTVKNQNGNGLKHVIPYGYPQSPILASFCFHQSFCGNIIKNISKSGDIYVSIYMDDILLSGNDLGRLEDTFKAVNEALVKSGYTVNRSKTQLPSTIVNVFNLELSQNSLRISAKRIVDFLQAYISSSHPPEKKGIASYVGSVNKEQARLFKSGGSKRTADGSEFEPKKKRKV

SEQ ID NO: 1734 - protein, 1695 aa, synthetic construct
MKRTADGSEFESPKKKRKVDKKYSIGLDIGTNSVGWAVITDEYKVPSKKFKVLGNTDRHSIKKNLIGALLFDSGETAEATRLKRTARRRYTRRKNRICYLQEIFSNEMAKVDDSFFHRLEESFLVEEDKKHERHPIFGNIVDEVAYHEKYPTIYHLRKKLVDSTDKADLRLIYLALAHMIKFRGHFLIEGDLNPDNSDVDKLFIQLVQTYNQLFEENPINASGVDAKAILSARLSKSRRLENLIAQLPGEKKNGLFGNLIALSLGLTPNFKSNFDLAEDAKLQLSKDTYDDDLDNLLAQIGDQYADLFLAAKNLSDAILLSDILRVNTEITKAPLSASMIKRYDEHHQDLTLLKALVRQQLPEKYKEIFFDQSKNGYAGYIDGGASQEEFYKFIKPILEKMDGTEELLVKLNREDLLRKQRTFDNGSIPHQIHLGELHAILRRQEDFYPFLKDNREKIEKILTFRIPYYVGPLARGNSRFAWMTRKSEETITPWNFEEVVDKGASAQSFIERMTNFDKNLPNEKVLPKHSLLYEYFTVYNELTKVKYVTEGMRKPAFLSGEQKKAIVDLLFKTNRKVTVKQLKEDYFKKIECFDSVEISGVEDRFNASLGTYHDLLKIIKDKDFLDNEENEDILEDIVLTLTLFEDREMIEERLKTYAHLFDDKVMKQLKRRRYTGWGRLSRKLINGIRDKQSGKTILDFLKSDGFANRNFMQLIHDDSLTFKEDIQKAQVSGQGDSLHEHIANLAGSPAIKKGILQTVKVVDELVKVMGRHKPENIVIEMARENQTTQKGQKNSRERMKRIEEGIKELGSQILKEHPVENTQLQNEKLYLYYLQNGRDMYVDQELDINRLSDYDVDAIVPQSFLKDDSIDNKVLTRSDKNRGKSDNVPSEEVVKKMKNYWRQLLNAKLITQRKFDNLTKAERGGLSELDKAGFIKRQLVETRQITKHVAQILDSRMNTKYDENDKLIREVKVITLKSKLVSDFRKDFQFYKVREINNYHHAHDAYLNAVVGTALIKKYPKLESEFVYGDYKVYDVRKMIAKSEQEIGKATAKYFFYSNIMNFFKTEITLANGEIRKRPLIETNGETGEIVWDKGRDFATVRKVLSMPQVNIVKKTEVQTGGFSKESILPKRNSDKLIARKKDWDPKKYGGFDSPTVAYSVLVVAKVEKGKSKKLKSVKELLGITIMERSSFEKNPIDFLEAKGYKEVKKDLIIKLPKYSLFELENGRKRMLASAGELQKGNELALPSKYVNFLYLASHYEKLKGSPEDNEQKQLFVEQHKHYLDEIIEQISEFSKRVILADANLDKVLSAYNKHRDKPIREQAENIIHLFTLTNLGAPAAFKYFDTTIDRKRYTSTKEVLDATLIHQSITGLYETRIDLSQLGGDSGGSSGGSSGSETPGTSESATPESSGGSSGGSSTAYQNRWLHKFEFKKDRWIYVPSLEERNKGLAFLDDLYLKWTPPLYYYHLRNGGHIAALKAHLENKYFTHIDIKGFFNSTGRSRITRVLKEFYQFEKAREIAKFSTVKNLVNSTPSHVLPFGFVQSPILATLCLHKSFLGNKIRECFNRKDIKISVYMDDIIISSSEKELLDEIYMELLKAVVRSNYYINEEKKNPPSDHVVVFNIHLSHLHLKITEKRIVDLLIDYTKAKSNHVKEGIKSYVKTVNSEQYKIFKSGGSKRTADGSEFEPKKKRKV

SEQ ID NO: 1735 - protein, 1694 aa, synthetic construct
MKRTADGSEFESPKKKRKVDKKYSIGLDIGTNSVGWAVITDEYKVPSKKFKVLGNTDRHSIKKNLIGALLFDSGETAEATRLKRTARRRYTRRKNRICYLQEIFSNEMAKVDDSFFHRLEESFLVEEDKKHERHPIFGNIVDEVAYHEKYPTIYHLRKKLVDSTDKADLRLIYLALAHMIKFRGHFLIEGDLNPDNSDVDKLFIQLVQTYNQLFEENPINASGVDAKAILSARLSKSRRLENLIAQLPGEKKNGLFGNLIALSLGLTPNFKSNFDLAEDAKLQLSKDTYDDDLDNLLAQIGDQYADLFLAAKNLSDAILLSDILRVNTEITKAPLSASMIKRYDEHHQDLTLLKALVRQQLPEKYKEIFFDQSKNGYAGYIDGGASQEEFYKFIKPILEKMDGTEELLVKLNREDLLRKQRTFDNGSIPHQIHLGELHAILRRQEDFYPFLKDNREKIEKILTFRIPYYVGPLARGNSRFAWMTRKSEETITPWNFEEVVDKGASAQSFIERMTNFDKNLPNEKVLPKHSLLYEYFTVYNELTKVKYVTEGMRKPAFLSGEQKKAIVDLLFKTNRKVTVKQLKEDYFKKIECFDSVEISGVEDRFNASLGTYHDLLKIIKDKDFLDNEENEDILEDIVLTLTLFEDREMIEERLKTYAHLFDDKVMKQLKRRRYTGWGRLSRKLINGIRDKQSGKTILDFLKSDGFANRNFMQLIHDDSLTFKEDIQKAQVSGQGDSLHEHIANLAGSPAIKKGILQTVKVVDELVKVMGRHKPENIVIEMARENQTTQKGQKNSRERMKRIEEGIKELGSQILKEHPVENTQLQNEKLYLYYLQNGRDMYVDQELDINRLSDYDVDAIVPQSFLKDDSIDNKVLTRSDKNRGKSDNVPSEEVVKKMKNYWRQLLNAKLITQRKFDNLTKAERGGLSELDKAGFIKRQLVETRQITKHVAQILDSRMNTKYDENDKLIREVKVITLKSKLVSDFRKDFQFYKVREINNYHHAHDAYLNAVVGTALIKKYPKLESEFVYGDYKVYDVRKMIAKSEQEIGKATAKYFFYSNIMNFFKTEITLANGEIRKRPLIETNGETGEIVWDKGRDFATVRKVLSMPQVNIVKKTEVQTGGFSKESILPKRNSDKLIARKKDWDPKKYGGFDSPTVAYSVLVVAKVEKGKSKKLKSVKELLGITIMERSSFEKNPIDFLEAKGYKEVKKDLIIKLPKYSLFELENGRKRMLASAGELQKGNELALPSKYVNFLYLASHYEKLKGSPEDNEQKQLFVEQHKHYLDEIIEQISEFSKRVILADANLDKVLSAYNKHRDKPIREQAENIIHLFTLTNLGAPAAFKYFDTTIDRKRYTSTKEVLDATLIHQSITGLYETRIDLSQLGGDSGGSSGGSSGSETPGTSESATPESSGGSSGGSSKPTSHWLHKFEVKENRWVYIPDAKTHQLGQKIHIYIKNKWKSPLYMYHLREGGHVAAANHHIRNKYFSLIDISNFFGATSQSRVTRELGRLIPYVKAREIAKLSTVHNLNGNGLKHVIPYGYPQSPILASLCFHQSFCGSTINTISKSGHVSVSIFMDDILLSSDDLDQLKNAFDMILEALRKSGYTVNEDKTQSPASMVNVFNLELSQNSLRVTSKRIVEFLQAFISSKNPYERKGIASYVGSINKAQAKLFRSGGSKRTADGSEFEPKKKRKV

SEQ ID NO: 1736 - protein, 1688 aa, synthetic construct
MKRTADGSEFESPKKKRKVDKKYSIGLDIGTNSVGWAVITDEYKVPSKKFKVLGNTDRHSIKKNLIGALLFDSGETAEATRLKRTARRRYTRRKNRICYLQEIFSNEMAKVDDSFFHRLEESFLVEEDKKHERHPIFGNIVDEVAYHEKYPTIYHLRKKLVDSTDKADLRLIYLALAHMIKFRGHFLIEGDLNPDNSDVDKLFIQLVQTYNQLFEENPINASGVDAKAILSARLSKSRRLENLIAQLPGEKKNGLFGNLIALSLGLTPNFKSNFDLAEDAKLQLSKDTYDDDLDNLLAQIGDQYADLFLAAKNLSDAILLSDILRVNTEITKAPLSASMIKRYDEHHQDLTLLKALVRQQLPEKYKEIFFDQSKNGYAGYIDGGASQEEFYKFIKPILEKMDGTEELLVKLNREDLLRKQRTFDNGSIPHQIHLGELHAILRRQEDFYPFLKDNREKIEKILTFRIPYYVGPLARGNSRFAWMTRKSEETITPWNFEEVVDKGASAQSFIERMTNFDKNLPNEKVLPKHSLLYEYFTVYNELTKVKYVTEGMRKPAFLSGEQKKAIVDLLFKTNRKVTVKQLKEDYFKKIECFDSVEISGVEDRFNASLGTYHDLLKIIKDKDFLDNEENEDILEDIVLTLTLFEDREMIEERLKTYAHLFDDKVMKQLKRRRYTGWGRLSRKLINGIRDKQSGKTILDFLKSDGFANRNFMQLIHDDSLTFKEDIQKAQVSGQGDSLHEHIANLAGSPAIKKGILQTVKVVDELVKVMGRHKPENIVIEMARENQTTQKGQKNSRERMKRIEEGIKELGSQILKEHPVENTQLQNEKLYLYYLQNGRDMYVDQELDINRLSDYDVDAIVPQSFLKDDSIDNKVLTRSDKNRGKSDNVPSEEVVKKMKNYWRQLLNAKLITQRKFDNLTKAERGGLSELDKAGFIKRQLVETRQITKHVAQILDSRMNTKYDENDKLIREVKVITLKSKLVSDFRKDFQFYKVREINNYHHAHDAYLNAVVGTALIKKYPKLESEFVYGDYKVYDVRKMIAKSEQEIGKATAKYFFYSNIMNFFKTEITLANGEIRKRPLIETNGETGEIVWDKGRDFATVRKVLSMPQVNIVKKTEVQTGGFSKESILPKRNSDKLIARKKDWDPKKYGGFDSPTVAYSVLVVAKVEKGKSKKLKSVKELLGITIMERSSFEKNPIDFLEAKGYKEVKKDLIIKLPKYSLFELENGRKRMLASAGELQKGNELALPSKYVNFLYLASHYEKLKGSPEDNEQKQLFVEQHKHYLDEIIEQISEFSKRVILADANLDKVLSAYNKHRDKPIREQAENIIHLFTLTNLGAPAAFKYFDTTIDRKRYTSTKEVLDATLIHQSITGLYETRIDLSQLGGDSGGSSGGSSGSETPGTSESATPESSGGSSGGSSWSNRFEIKKDRWVYNPTIESRAFGKQILKHLNKSWKKPDYYYHLRDGGHVEALKIHLESQFFATIDISDFFGYLSRSRITRTLKSILSYDVARKIAKISTVKAMDSYPHSHHLPYGFVQSPLLASICLFDSTLGNLLDTINKNNSAKVSVYMDDIVISSNDENLLISLFNDIHVAAKKSNFLLNPTKTKSVAQQTEAFNIILSHRMMKVEYNRFLDFQQAYALSDSEYVRNGIGSYVGSINKQQAKLLSGGSKRTADGSEFEPKKKRKV

SEQ ID NO: 1737 - protein, 1693 aa, synthetic construct
MKRTADGSEFESPKKKRKVDKKYSIGLDIGTNSVGWAVITDEYKVPSKKFKVLGNTDRHSIKKNLIGALLFDSGETAEATRLKRTARRRYTRRKNRICYLQEIFSNEMAKVDDSFFHRLEESFLVEEDKKHERHPIFGNIVDEVAYHEKYPTIYHLRKKLVDSTDKADLRLIYLALAHMIKFRGHFLIEGDLNPDNSDVDKLFIQLVQTYNQLFEENPINASGVDAKAILSARLSKSRRLENLIAQLPGEKKNGLFGNLIALSLGLTPNFKSNFDLAEDAKLQLSKDTYDDDLDNLLAQIGDQYADLFLAAKNLSDAILLSDILRVNTEITKAPLSASMIKRYDEHHQDLTLLKALVRQQLPEKYKEIFFDQSKNGYAGYIDGGASQEEFYKFIKPILEKMDGTEELLVKLNREDLLRKQRTFDNGSIPHQIHLGELHAILRRQEDFYPFLKDNREKIEKILTFRIPYYVGPLARGNSRFAWMTRKSEETITPWNFEEVVDKGASAQSFIERMTNFDKNLPNEKVLPKHSLLYEYFTVYNELTKVKYVTEGMRKPAFLSGEQKKAIVDLLFKTNRKVTVKQLKEDYFKKIECFDSVEISGVEDRFNASLGTYHDLLKIIKDKDFLDNEENEDILEDIVLTLTLFEDREMIEERLKTYAHLFDDKVMKQLKRRRYTGWGRLSRKLINGIRDKQSGKTILDFLKSDGFANRNFMQLIHDDSLTFKEDIQKAQVSGQGDSLHEHIANLAGSPAIKKGILQTVKVVDELVKVMGRHKPENIVIEMARENQTTQKGQKNSRERMKRIEEGIKELGSQILKEHPVENTQLQNEKLYLYYLQNGRDMYVDQELDINRLSDYDVDAIVPQSFLKDDSIDNKVLTRSDKNRGKSDNVPSEEVVKKMKNYWRQLLNAKLITQRKFDNLTKAERGGLSELDKAGFIKRQLVETRQITKHVAQILDSRMNTKYDENDKLIREVKVITLKSKLVSDFRKDFQFYKVREINNYHHAHDAYLNAVVGTALIKKYPKLESEFVYGDYKVYDVRKMIAKSEQEIGKATAKYFFYSNIMNFFKTEITLANGEIRKRPLIETNGETGEIVWDKGRDFATVRKVLSMPQVNIVKKTEVQTGGFSKESILPKRNSDKLIARKKDWDPKKYGGFDSPTVAYSVLVVAKVEKGKSKKLKSVKELLGITIMERSSFEKNPIDFLEAKGYKEVKKDLIIKLPKYSLFELENGRKRMLASAGELQKGNELALPSKYVNFLYLASHYEKLKGSPEDNEQKQLFVEQHKHYLDEIIEQISEFSKRVILADANLDKVLSAYNKHRDKPIREQAENIIHLFTLTNLGAPAAFKYFDTTIDRKRYTSTKEVLDATLIHQSITGLYETRIDLSQLGGDSGGSSGGSSGSETPGTSESATPESSGGSSGGSSETWKHKYLLKENKWVHIPSEEMIKYGSSLHKYIKRNWKFPLYYYHLRNGGHVAAAKLHKSNDFFCLIDIKGFFESTSQSRVTRELKKIIPYDKARHIAKLSTVRLPNAVKHKFAVPYGYPQSPVLATLCLQNSYAGTVIDSFYKSGIVTVSVYMDDIILSSKDLATLNQHFEILCEALRKSRYELNFSKTQNPATKISVFNLELGHRHLKVESERMVLFIQAFAKTRNKHEKKSIAKYVHTVNPDQAERHFPKSGGSKRTADGSEFEPKKKRKV

SEQ ID NO: 1738 - protein, 1689 aa, synthetic construct
MKRTADGSEFESPKKKRKVDKKYSIGLDIGTNSVGWAVITDEYKVPSKKFKVLGNTDRHSIKKNLIGALLFDSGETAEATRLKRTARRRYTRRKNRICYLQEIFSNEMAKVDDSFFHRLEESFLVEEDKKHERHPIFGNIVDEVAYHEKYPTIYHLRKKLVDSTDKADLRLIYLALAHMIKFRGHFLIEGDLNPDNSDVDKLFIQLVQTYNQLFEENPINASGVDAKAILSARLSKSRRLENLIAQLPGEKKNGLFGNLIALSLGLTPNFKSNFDLAEDAKLQLSKDTYDDDLDNLLAQIGDQYADLFLAAKNLSDAILLSDILRVNTEITKAPLSASMIKRYDEHHQDLTLLKALVRQQLPEKYKEIFFDQSKNGYAGYIDGGASQEEFYKFIKPILEKMDGTEELLVKLNREDLLRKQRTFDNGSIPHQIHLGELHAILRRQEDFYPFLKDNREKIEKILTFRIPYYVGPLARGNSRFAWMTRKSEETITPWNFEEVVDKGASAQSFIERMTNFDKNLPNEKVLPKHSLLYEYFTVYNELTKVKYVTEGMRKPAFLSGEQKKAIVDLLFKTNRKVTVKQLKEDYFKKIECFDSVEISGVEDRFNASLGTYHDLLKIIKDKDFLDNEENEDILEDIVLTLTLFEDREMIEERLKTYAHLFDDKVMKQLKRRRYTGWGRLSRKLINGIRDKQSGKTILDFLKSDGFANRNFMQLIHDDSLTFKEDIQKAQVSGQGDSLHEHIANLAGSPAIKKGILQTVKVVDELVKVMGRHKPENIVIEMARENQTTQKGQKNSRERMKRIEEGIKELGSQILKEHPVENTQLQNEKLYLYYLQNGRDMYVDQELDINRLSDYDVDAIVPQSFLKDDSIDNKVLTRSDKNRGKSDNVPSEEVVKKMKNYWRQLLNAKLITQRKFDNLTKAERGGLSELDKAGFIKRQLVETRQITKHVAQILDSRMNTKYDENDKLIREVKVITLKSKLVSDFRKDFQFYKVREINNYHHAHDAYLNAVVGTALIKKYPKLESEFVYGDYKVYDVRKMIAKSEQEIGKATAKYFFYSNIMNFFKTEITLANGEIRKRPLIETNGETGEIVWDKGRDFATVRKVLSMPQVNIVKKTEVQTGGFSKESILPKRNSDKLIARKKDWDPKKYGGFDSPTVAYSVLVVAKVEKGKSKKLKSVKELLGITIMERSSFEKNPIDFLEAKGYKEVKKDLIIKLPKYSLFELENGRKRMLASAGELQKGNELALPSKYVNFLYLASHYEKLKGSPEDNEQKQLFVEQHKHYLDEIIEQISEFSKRVILADANLDKVLSAYNKHRDKPIREQAENIIHLFTLTNLGAPAAFKYFDTTIDRKRYTSTKEVLDATLIHQSITGLYETRIDLSQLGGDSGGSSGGSSGSETPGTSESATPESSGGSSGGSSWLHKFEIKENRWVFIPNEDTLTLGRKIHKYIKSKWKFPLYMFHLRDGGHVAAANYHIENTYFCLIDISDFFGATSQSRITRELNKFIPYDRAREIAKLSTVKNLNSNGLKKVLPYGYPQSPILASFCFRQSYCGKVIHTLSKSGNISISVYMDDILLSSDDIEQLVYAFNSIKTALKKSGYTVNEAKTQSPSTSVNVFNLVLSKNLLKVSSIRIVEFLQAYISSQNPAEKKGIASYVGSVNKTQAKLFQSGGSKRTADGSEFEPKKKRKV

SEQ ID NO: 1739 - protein, 1690 aa, synthetic construct
MKRTADGSEFESPKKKRKVDKKYSIGLDIGTNSVGWAVITDEYKVPSKKFKVLGNTDRHSIKKNLIGALLFDSGETAEATRLKRTARRRYTRRKNRICYLQEIFSNEMAKVDDSFFHRLEESFLVEEDKKHERHPIFGNIVDEVAYHEKYPTIYHLRKKLVDSTDKADLRLIYLALAHMIKFRGHFLIEGDLNPDNSDVDKLFIQLVQTYNQLFEENPINASGVDAKAILSARLSKSRRLENLIAQLPGEKKNGLFGNLIALSLGLTPNFKSNFDLAEDAKLQLSKDTYDDDLDNLLAQIGDQYADLFLAAKNLSDAILLSDILRVNTEITKAPLSASMIKRYDEHHQDLTLLKALVRQQLPEKYKEIFFDQSKNGYAGYIDGGASQEEFYKFIKPILEKMDGTEELLVKLNREDLLRKQRTFDNGSIPHQIHLGELHAILRRQEDFYPFLKDNREKIEKILTFRIPYYVGPLARGNSRFAWMTRKSEETITPWNFEEVVDKGASAQSFIERMTNFDKNLPNEKVLPKHSLLYEYFTVYNELTKVKYVTEGMRKPAFLSGEQKKAIVDLLFKTNRKVTVKQLKEDYFKKIECFDSVEISGVEDRFNASLGTYHDLLKIIKDKDFLDNEENEDILEDIVLTLTLFEDREMIEERLKTYAHLFDDKVMKQLKRRRYTGWGRLSRKLINGIRDKQSGKTILDFLKSDGFANRNFMQLIHDDSLTFKEDIQKAQVSGQGDSLHEHIANLAGSPAIKKGILQTVKVVDELVKVMGRHKPENIVIEMARENQTTQKGQKNSRERMKRIEEGIKELGSQILKEHPVENTQLQNEKLYLYYLQNGRDMYVDQELDINRLSDYDVDAIVPQSFLKDDSIDNKVLTRSDKNRGKSDNVPSEEVVKKMKNYWRQLLNAKLITQRKFDNLTKAERGGLSELDKAGFIKRQLVETRQITKHVAQILDSRMNTKYDENDKLIREVKVITLKSKLVSDFRKDFQFYKVREINNYHHAHDAYLNAVVGTALIKKYPKLESEFVYGDYKVYDVRKMIAKSEQEIGKATAKYFFYSNIMNFFKTEITLANGEIRKRPLIETNGETGEIVWDKGRDFATVRKVLSMPQVNIVKKTEVQTGGFSKESILPKRNSDKLIARKKDWDPKKYGGFDSPTVAYSVLVVAKVEKGKSKKLKSVKELLGITIMERSSFEKNPIDFLEAKGYKEVKKDLIIKLPKYSLFELENGRKRMLASAGELQKGNELALPSKYVNFLYLASHYEKLKGSPEDNEQKQLFVEQHKHYLDEIIEQISEFSKRVILADANLDKVLSAYNKHRDKPIREQAENIIHLFTLTNLGAPAAFKYFDTTIDRKRYTSTKEVLDATLIHQSITGLYETRIDLSQLGGDSGGSSGGSSGSETPGTSESATPESSGGSSGGSSERWRSKFKIKECTWVFVPTDETIATGLQVKELIEGYWSAPDHYYHLRKGGHVLALQKHTKHKFFIHLDIQNFFGQINKSRVTRCLKEHIPYESAREIAVESTVRLPESAETKFILPFGFVQSPIIASLCLSKSALGRYLYRLEQRKGLDVSVYMDDILISGDNIEELEQELVKIKAAAEKSGLPLNPLKQEGPDTCVSAFNIRLSQGLLKIIPSKLQELANTYSSSTNEHQRAGILNYVLSINLAQAELFSGGSKRTADGSEFEPKKKRKV

SEQ ID NO: 1740 - protein, 1646 aa, synthetic construct
MKRTADGSEFESPKKKRKVDKKYSIGLDIGTNSVGWAVITDEYKVPSKKFKVLGNTDRHSIKKNLIGALLFDSGETAEATRLKRTARRRYTRRKNRICYLQEIFSNEMAKVDDSFFHRLEESFLVEEDKKHERHPIFGNIVDEVAYHEKYPTIYHLRKKLVDSTDKADLRLIYLALAHMIKFRGHFLIEGDLNPDNSDVDKLFIQLVQTYNQLFEENPINASGVDAKAILSARLSKSRRLENLIAQLPGEKKNGLFGNLIALSLGLTPNFKSNFDLAEDAKLQLSKDTYDDDLDNLLAQIGDQYADLFLAAKNLSDAILLSDILRVNTEITKAPLSASMIKRYDEHHQDLTLLKALVRQQLPEKYKEIFFDQSKNGYAGYIDGGASQEEFYKFIKPILEKMDGTEELLVKLNREDLLRKQRTFDNGSIPHQIHLGELHAILRRQEDFYPFLKDNREKIEKILTFRIPYYVGPLARGNSRFAWMTRKSEETITPWNFEEVVDKGASAQSFIERMTNFDKNLPNEKVLPKHSLLYEYFTVYNELTKVKYVTEGMRKPAFLSGEQKKAIVDLLFKTNRKVTVKQLKEDYFKKIECFDSVEISGVEDRFNASLGTYHDLLKIIKDKDFLDNEENEDILEDIVLTLTLFEDREMIEERLKTYAHLFDDKVMKQLKRRRYTGWGRLSRKLINGIRDKQSGKTILDFLKSDGFANRNFMQLIHDDSLTFKEDIQKAQVSGQGDSLHEHIANLAGSPAIKKGILQTVKVVDELVKVMGRHKPENIVIEMARENQTTQKGQKNSRERMKRIEEGIKELGSQILKEHPVENTQLQNEKLYLYYLQNGRDMYVDQELDINRLSDYDVDAIVPQSFLKDDSIDNKVLTRSDKNRGKSDNVPSEEVVKKMKNYWRQLLNAKLITQRKFDNLTKAERGGLSELDKAGFIKRQLVETRQITKHVAQILDSRMNTKYDENDKLIREVKVITLKSKLVSDFRKDFQFYKVREINNYHHAHDAYLNAVVGTALIKKYPKLESEFVYGDYKVYDVRKMIAKSEQEIGKATAKYFFYSNIMNFFKTEITLANGEIRKRPLIETNGETGEIVWDKGRDFATVRKVLSMPQVNIVKKTEVQTGGFSKESILPKRNSDKLIARKKDWDPKKYGGFDSPTVAYSVLVVAKVEKGKSKKLKSVKELLGITIMERSSFEKNPIDFLEAKGYKEVKKDLIIKLPKYSLFELENGRKRMLASAGELQKGNELALPSKYVNFLYLASHYEKLKGSPEDNEQKQLFVEQHKHYLDEIIEQISEFSKRVILADANLDKVLSAYNKHRDKPIREQAENIIHLFTLTNLGAPAAFKYFDTTIDRKRYTSTKEVLDATLIHQSITGLYETRIDLSQLGGDSGGSSGGSSGSETPGTSESATPESSGGSSGGSSGKWFFVPNDKCERRGRRMLAYFKRRLVFPDYMYHFKKGGHVGALHAHLNNQLFFKIDIQNFYYSIARMRVTRALRQWGYPGANTFAMWSCVRNPLPGPKHALPIGFVQSPLLASLALIKSEVAEAIDRATAKGVCISVYLDDFIGSHDDEAVLKEAYEDIRATCVAAGFIPNPSKLAPPQAAITAFNCDLTSGAAEVTTDRVAKYLSGGSKRTADGSEFEPKKKRKV

SEQ ID NO: 1741 - protein, 1690 aa, synthetic construct
MKRTADGSEFESPKKKRKVDKKYSIGLDIGTNSVGWAVITDEYKVPSKKFKVLGNTDRHSIKKNLIGALLFDSGETAEATRLKRTARRRYTRRKNRICYLQEIFSNEMAKVDDSFFHRLEESFLVEEDKKHERHPIFGNIVDEVAYHEKYPTIYHLRKKLVDSTDKADLRLIYLALAHMIKFRGHFLIEGDLNPDNSDVDKLFIQLVQTYNQLFEENPINASGVDAKAILSARLSKSRRLENLIAQLPGEKKNGLFGNLIALSLGLTPNFKSNFDLAEDAKLQLSKDTYDDDLDNLLAQIGDQYADLFLAAKNLSDAILLSDILRVNTEITKAPLSASMIKRYDEHHQDLTLLKALVRQQLPEKYKEIFFDQSKNGYAGYIDGGASQEEFYKFIKPILEKMDGTEELLVKLNREDLLRKQRTFDNGSIPHQIHLGELHAILRRQEDFYPFLKDNREKIEKILTFRIPYYVGPLARGNSRFAWMTRKSEETITPWNFEEVVDKGASAQSFIERMTNFDKNLPNEKVLPKHSLLYEYFTVYNELTKVKYVTEGMRKPAFLSGEQKKAIVDLLFKTNRKVTVKQLKEDYFKKIECFDSVEISGVEDRFNASLGTYHDLLKIIKDKDFLDNEENEDILEDIVLTLTLFEDREMIEERLKTYAHLFDDKVMKQLKRRRYTGWGRLSRKLINGIRDKQSGKTILDFLKSDGFANRNFMQLIHDDSLTFKEDIQKAQVSGQGDSLHEHIANLAGSPAIKKGILQTVKVVDELVKVMGRHKPENIVIEMARENQTTQKGQKNSRERMKRIEEGIKELGSQILKEHPVENTQLQNEKLYLYYLQNGRDMYVDQELDINRLSDYDVDAIVPQSFLKDDSIDNKVLTRSDKNRGKSDNVPSEEVVKKMKNYWRQLLNAKLITQRKFDNLTKAERGGLSELDKAGFIKRQLVETRQITKHVAQILDSRMNTKYDENDKLIREVKVITLKSKLVSDFRKDFQFYKVREINNYHHAHDAYLNAVVGTALIKKYPKLESEFVYGDYKVYDVRKMIAKSEQEIGKATAKYFFYSNIMNFFKTEITLANGEIRKRPLIETNGETGEIVWDKGRDFATVRKVLSMPQVNIVKKTEVQTGGFSKESILPKRNSDKLIARKKDWDPKKYGGFDSPTVAYSVLVVAKVEKGKSKKLKSVKELLGITIMERSSFEKNPIDFLEAKGYKEVKKDLIIKLPKYSLFELENGRKRMLASAGELQKGNELALPSKYVNFLYLASHYEKLKGSPEDNEQKQLFVEQHKHYLDEIIEQISEFSKRVILADANLDKVLSAYNKHRDKPIREQAENIIHLFTLTNLGAPAAFKYFDTTIDRKRYTSTKEVLDATLIHQSITGLYETRIDLSQLGGDSGGSSGGSSGSETPGTSESATPESSGGSSGGSSHKWLSRFRIKSNTWVYVPTLEAVKEGKLLKKIIEFKWSPPANYYHLKSGGHVDALKYHLNGKFFVHADIKKFFNSINRSRITRELKPYFGYEKSRAIAMESTVSIPLDSGQVFALPFGFVQSTIIASLCFRKSSLGNTIDILNNTKGVRVSIYVDDIIISTHCLEKAEAALLMIQKSAARSGFTLNEEKTQGPSTTITAFNIDLQQNLMKITDWRFNELLSSYKDASSDKQKSGIWGYVNSISPAQASMLSGGSKRTADGSEFEPKKKRKV

SEQ ID NO: 1742 - protein, 1686 aa, synthetic construct
MKRTADGSEFESPKKKRKVDKKYSIGLDIGTNSVGWAVITDEYKVPSKKFKVLGNTDRHSIKKNLIGALLFDSGETAEATRLKRTARRRYTRRKNRICYLQEIFSNEMAKVDDSFFHRLEESFLVEEDKKHERHPIFGNIVDEVAYHEKYPTIYHLRKKLVDSTDKADLRLIYLALAHMIKFRGHFLIEGDLNPDNSDVDKLFIQLVQTYNQLFEENPINASGVDAKAILSARLSKSRRLENLIAQLPGEKKNGLFGNLIALSLGLTPNFKSNFDLAEDAKLQLSKDTYDDDLDNLLAQIGDQYADLFLAAKNLSDAILLSDILRVNTEITKAPLSASMIKRYDEHHQDLTLLKALVRQQLPEKYKEIFFDQSKNGYAGYIDGGASQEEFYKFIKPILEKMDGTEELLVKLNREDLLRKQRTFDNGSIPHQIHLGELHAILRRQEDFYPFLKDNREKIEKILTFRIPYYVGPLARGNSRFAWMTRKSEETITPWNFEEVVDKGASAQSFIERMTNFDKNLPNEKVLPKHSLLYEYFTVYNELTKVKYVTEGMRKPAFLSGEQKKAIVDLLFKTNRKVTVKQLKEDYFKKIECFDSVEISGVEDRFNASLGTYHDLLKIIKDKDFLDNEENEDILEDIVLTLTLFEDREMIEERLKTYAHLFDDKVMKQLKRRRYTGWGRLSRKLINGIRDKQSGKTILDFLKSDGFANRNFMQLIHDDSLTFKEDIQKAQVSGQGDSLHEHIANLAGSPAIKKGILQTVKVVDELVKVMGRHKPENIVIEMARENQTTQKGQKNSRERMKRIEEGIKELGSQILKEHPVENTQLQNEKLYLYYLQNGRDMYVDQELDINRLSDYDVDAIVPQSFLKDDSIDNKVLTRSDKNRGKSDNVPSEEVVKKMKNYWRQLLNAKLITQRKFDNLTKAERGGLSELDKAGFIKRQLVETRQITKHVAQILDSRMNTKYDENDKLIREVKVITLKSKLVSDFRKDFQFYKVREINNYHHAHDAYLNAVVGTALIKKYPKLESEFVYGDYKVYDVRKMIAKSEQEIGKATAKYFFYSNIMNFFKTEITLANGEIRKRPLIETNGETGEIVWDKGRDFATVRKVLSMPQVNIVKKTEVQTGGFSKESILPKRNSDKLIARKKDWDPKKYGGFDSPTVAYSVLVVAKVEKGKSKKLKSVKELLGITIMERSSFEKNPIDFLEAKGYKEVKKDLIIKLPKYSLFELENGRKRMLASAGELQKGNELALPSKYVNFLYLASHYEKLKGSPEDNEQKQLFVEQHKHYLDEIIEQISEFSKRVILADANLDKVLSAYNKHRDKPIREQAENIIHLFTLTNLGAPAAFKYFDTTIDRKRYTSTKEVLDATLIHQSITGLYETRIDLSQLGGDSGGSSGGSSGSETPGTSESATPESSGGSSGGSSWTSKYEMKPGRWVYVQSSEAKKLGRNINEHIRKHWKIPSYFYHLQLGGHVQALKVHIDNKHFSSLDITDFFGSVSRTRVTRELKSLIGYERARAIAKASTIPHCNPDEHSHSLPYGFSQSPLLASICLAQSHFGSCIRACHETDGMSLSVYMDDIVISSNDEQMLLLWHEKLKIAAGKSKFKLNSLKENISSTSIEVFNINITEHEMHVSDKRFSKLHTVYSLSESEHQRKGIGGYVWTVNPDQAKSGGSKRTADGSEFEPKKKRKV

SEQ ID NO: 1743 - protein, 1694 aa, synthetic construct
MKRTADGSEFESPKKKRKVDKKYSIGLDIGTNSVGWAVITDEYKVPSKKFKVLGNTDRHSIKKNLIGALLFDSGETAEATRLKRTARRRYTRRKNRICYLQEIFSNEMAKVDDSFFHRLEESFLVEEDKKHERHPIFGNIVDEVAYHEKYPTIYHLRKKLVDSTDKADLRLIYLALAHMIKFRGHFLIEGDLNPDNSDVDKLFIQLVQTYNQLFEENPINASGVDAKAILSARLSKSRRLENLIAQLPGEKKNGLFGNLIALSLGLTPNFKSNFDLAEDAKLQLSKDTYDDDLDNLLAQIGDQYADLFLAAKNLSDAILLSDILRVNTEITKAPLSASMIKRYDEHHQDLTLLKALVRQQLPEKYKEIFFDQSKNGYAGYIDGGASQEEFYKFIKPILEKMDGTEELLVKLNREDLLRKQRTFDNGSIPHQIHLGELHAILRRQEDFYPFLKDNREKIEKILTFRIPYYVGPLARGNSRFAWMTRKSEETITPWNFEEVVDKGASAQSFIERMTNFDKNLPNEKVLPKHSLLYEYFTVYNELTKVKYVTEGMRKPAFLSGEQKKAIVDLLFKTNRKVTVKQLKEDYFKKIECFDSVEISGVEDRFNASLGTYHDLLKIIKDKDFLDNEENEDILEDIVLTLTLFEDREMIEERLKTYAHLFDDKVMKQLKRRRYTGWGRLSRKLINGIRDKQSGKTILDFLKSDGFANRNFMQLIHDDSLTFKEDIQKAQVSGQGDSLHEHIANLAGSPAIKKGILQTVKVVDELVKVMGRHKPENIVIEMARENQTTQKGQKNSRERMKRIEEGIKELGSQILKEHPVENTQLQNEKLYLYYLQNGRDMYVDQELDINRLSDYDVDAIVPQSFLKDDSIDNKVLTRSDKNRGKSDNVPSEEVVKKMKNYWRQLLNAKLITQRKFDNLTKAERGGLSELDKAGFIKRQLVETRQITKHVAQILDSRMNTKYDENDKLIREVKVITLKSKLVSDFRKDFQFYKVREINNYHHAHDAYLNAVVGTALIKKYPKLESEFVYGDYKVYDVRKMIAKSEQEIGKATAKYFFYSNIMNFFKTEITLANGEIRKRPLIETNGETGEIVWDKGRDFATVRKVLSMPQVNIVKKTEVQTGGFSKESILPKRNSDKLIARKKDWDPKKYGGFDSPTVAYSVLVVAKVEKGKSKKLKSVKELLGITIMERSSFEKNPIDFLEAKGYKEVKKDLIIKLPKYSLFELENGRKRMLASAGELQKGNELALPSKYVNFLYLASHYEKLKGSPEDNEQKQLFVEQHKHYLDEIIEQISEFSKRVILADANLDKVLSAYNKHRDKPIREQAENIIHLFTLTNLGAPAAFKYFDTTIDRKRYTSTKEVLDATLIHQSITGLYETRIDLSQLGGDSGGSSGGSSGSETPGTSESATPESSGGSSGGSSIYTASWSNRFEIKQGRWVYNPTTECRTQGSDILKELNKSWKKPEYYYHLREGGHVAALNVHKGSKYFATLDLCDFYGSISRSRVTRALKPIIGYERARKVAKISTVKAPSNYPYSHYLPYGFVQSPILASICLFDSYLGKLIDSLHDETASINISVYMDDIVISSNDEEALVSTFSELELAAYKSKFALSEKKTKQVATSTSAFNIIISIDEMIIEEERFQQLKLVYSMSESKHQRHGIGSYVGTVNKQQARLLSGGSKRTADGSEFEPKKKRKV

SEQ ID NO: 1744 - protein, 1691 aa, synthetic construct
MKRTADGSEFESPKKKRKVDKKYSIGLDIGTNSVGWAVITDEYKVPSKKFKVLGNTDRHSIKKNLIGALLFDSGETAEATRLKRTARRRYTRRKNRICYLQEIFSNEMAKVDDSFFHRLEESFLVEEDKKHERHPIFGNIVDEVAYHEKYPTIYHLRKKLVDSTDKADLRLIYLALAHMIKFRGHFLIEGDLNPDNSDVDKLFIQLVQTYNQLFEENPINASGVDAKAILSARLSKSRRLENLIAQLPGEKKNGLFGNLIALSLGLTPNFKSNFDLAEDAKLQLSKDTYDDDLDNLLAQIGDQYADLFLAAKNLSDAILLSDILRVNTEITKAPLSASMIKRYDEHHQDLTLLKALVRQQLPEKYKEIFFDQSKNGYAGYIDGGASQEEFYKFIKPILEKMDGTEELLVKLNREDLLRKQRTFDNGSIPHQIHLGELHAILRRQEDFYPFLKDNREKIEKILTFRIPYYVGPLARGNSRFAWMTRKSEETITPWNFEEVVDKGASAQSFIERMTNFDKNLPNEKVLPKHSLLYEYFTVYNELTKVKYVTEGMRKPAFLSGEQKKAIVDLLFKTNRKVTVKQLKEDYFKKIECFDSVEISGVEDRFNASLGTYHDLLKIIKDKDFLDNEENEDILEDIVLTLTLFEDREMIEERLKTYAHLFDDKVMKQLKRRRYTGWGRLSRKLINGIRDKQSGKTILDFLKSDGFANRNFMQLIHDDSLTFKEDIQKAQVSGQGDSLHEHIANLAGSPAIKKGILQTVKVVDELVKVMGRHKPENIVIEMARENQTTQKGQKNSRERMKRIEEGIKELGSQILKEHPVENTQLQNEKLYLYYLQNGRDMYVDQELDINRLSDYDVDAIVPQSFLKDDSIDNKVLTRSDKNRGKSDNVPSEEVVKKMKNYWRQLLNAKLITQRKFDNLTKAERGGLSELDKAGFIKRQLVETRQITKHVAQILDSRMNTKYDENDKLIREVKVITLKSKLVSDFRKDFQFYKVREINNYHHAHDAYLNAVVGTALIKKYPKLESEFVYGDYKVYDVRKMIAKSEQEIGKATAKYFFYSNIMNFFKTEITLANGEIRKRPLIETNGETGEIVWDKGRDFATVRKVLSMPQVNIVKKTEVQTGGFSKESILPKRNSDKLIARKKDWDPKKYGGFDSPTVAYSVLVVAKVEKGKSKKLKSVKELLGITIMERSSFEKNPIDFLEAKGYKEVKKDLIIKLPKYSLFELENGRKRMLASAGELQKGNELALPSKYVNFLYLASHYEKLKGSPEDNEQKQLFVEQHKHYLDEIIEQISEFSKRVILADANLDKVLSAYNKHRDKPIREQAENIIHLFTLTNLGAPAAFKYFDTTIDRKRYTSTKEVLDATLIHQSITGLYETRIDLSQLGGDSGGSSGGSSGSETPGTSESATPESSGGSSGGSSDEWLHKFEIKENRWVYVPSEETLELGQKIHAYIKHKWKYPLYMFHLREGGHVAAANYHIKKQYFSLIDISDFFGATSQSRVTRELGRLIPYVKAREIAKLSTVKNPNGNGLKHVIPYGYPQSPILASLCFHQSFCGGVINTISKSGQISVSIYMDDILLSSDDMSQLENAFDTVKEALRKSGYCVNENKTQSPSTMVNVFNLELSQNSLRVTPKRIVEFLQAYISSKNPHERKGIASYVGSVNKSQAKLFRSGGSKRTADGSEFEPKKKRKV

SEQ ID NO: 1745 - protein, 1686 aa, synthetic construct
MKRTADGSEFESPKKKRKVDKKYSIGLDIGTNSVGWAVITDEYKVPSKKFKVLGNTDRHSIKKNLIGALLFDSGETAEATRLKRTARRRYTRRKNRICYLQEIFSNEMAKVDDSFFHRLEESFLVEEDKKHERHPIFGNIVDEVAYHEKYPTIYHLRKKLVDSTDKADLRLIYLALAHMIKFRGHFLIEGDLNPDNSDVDKLFIQLVQTYNQLFEENPINASGVDAKAILSARLSKSRRLENLIAQLPGEKKNGLFGNLIALSLGLTPNFKSNFDLAEDAKLQLSKDTYDDDLDNLLAQIGDQYADLFLAAKNLSDAILLSDILRVNTEITKAPLSASMIKRYDEHHQDLTLLKALVRQQLPEKYKEIFFDQSKNGYAGYIDGGASQEEFYKFIKPILEKMDGTEELLVKLNREDLLRKQRTFDNGSIPHQIHLGELHAILRRQEDFYPFLKDNREKIEKILTFRIPYYVGPLARGNSRFAWMTRKSEETITPWNFEEVVDKGASAQSFIERMTNFDKNLPNEKVLPKHSLLYEYFTVYNELTKVKYVTEGMRKPAFLSGEQKKAIVDLLFKTNRKVTVKQLKEDYFKKIECFDSVEISGVEDRFNASLGTYHDLLKIIKDKDFLDNEENEDILEDIVLTLTLFEDREMIEERLKTYAHLFDDKVMKQLKRRRYTGWGRLSRKLINGIRDKQSGKTILDFLKSDGFANRNFMQLIHDDSLTFKEDIQKAQVSGQGDSLHEHIANLAGSPAIKKGILQTVKVVDELVKVMGRHKPENIVIEMARENQTTQKGQKNSRERMKRIEEGIKELGSQILKEHPVENTQLQNEKLYLYYLQNGRDMYVDQELDINRLSDYDVDAIVPQSFLKDDSIDNKVLTRSDKNRGKSDNVPSEEVVKKMKNYWRQLLNAKLITQRKFDNLTKAERGGLSELDKAGFIKRQLVETRQITKHVAQILDSRMNTKYDENDKLIREVKVITLKSKLVSDFRKDFQFYKVREINNYHHAHDAYLNAVVGTALIKKYPKLESEFVYGDYKVYDVRKMIAKSEQEIGKATAKYFFYSNIMNFFKTEITLANGEIRKRPLIETNGETGEIVWDKGRDFATVRKVLSMPQVNIVKKTEVQTGGFSKESILPKRNSDKLIARKKDWDPKKYGGFDSPTVAYSVLVVAKVEKGKSKKLKSVKELLGITIMERSSFEKNPIDFLEAKGYKEVKKDLIIKLPKYSLFELENGRKRMLASAGELQKGNELALPSKYVNFLYLASHYEKLKGSPEDNEQKQLFVEQHKHYLDEIIEQISEFSKRVILADANLDKVLSAYNKHRDKPIREQAENIIHLFTLTNLGAPAAFKYFDTTIDRKRYTSTKEVLDATLIHQSITGLYETRIDLSQLGGDSGGSSGGSSGSETPGTSESATPESSGGSSGGSSRWDSKFELKPGKWVFVPTPETIEQGKQIKDQIQERWKAPAYYYHLRQGGHVAALKQHLGHTYFIHVDIKNFFGSINRSRVTRALKGYFGYDKAREIAMESTVRLPEDAEQRYILPFGFVQSPIIASVCLRKSALGRCLHQLSQQDGVEVSVYVDDIIISANDPERLEQAFEDIKKAAEKSGFPLNEEKQQGPSERITAFNIELSQNSLQITPERWGEFLDAYHQSTNDHQKQGILGYVNSVNPAQASGGSKRTADGSEFEPKKKRKV

SEQ ID NO: 1746 - protein, 1689 aa, synthetic construct
MKRTADGSEFESPKKKRKVDKKYSIGLDIGTNSVGWAVITDEYKVPSKKFKVLGNTDRHSIKKNLIGALLFDSGETAEATRLKRTARRRYTRRKNRICYLQEIFSNEMAKVDDSFFHRLEESFLVEEDKKHERHPIFGNIVDEVAYHEKYPTIYHLRKKLVDSTDKADLRLIYLALAHMIKFRGHFLIEGDLNPDNSDVDKLFIQLVQTYNQLFEENPINASGVDAKAILSARLSKSRRLENLIAQLPGEKKNGLFGNLIALSLGLTPNFKSNFDLAEDAKLQLSKDTYDDDLDNLLAQIGDQYADLFLAAKNLSDAILLSDILRVNTEITKAPLSASMIKRYDEHHQDLTLLKALVRQQLPEKYKEIFFDQSKNGYAGYIDGGASQEEFYKFIKPILEKMDGTEELLVKLNREDLLRKQRTFDNGSIPHQIHLGELHAILRRQEDFYPFLKDNREKIEKILTFRIPYYVGPLARGNSRFAWMTRKSEETITPWNFEEVVDKGASAQSFIERMTNFDKNLPNEKVLPKHSLLYEYFTVYNELTKVKYVTEGMRKPAFLSGEQKKAIVDLLFKTNRKVTVKQLKEDYFKKIECFDSVEISGVEDRFNASLGTYHDLLKIIKDKDFLDNEENEDILEDIVLTLTLFEDREMIEERLKTYAHLFDDKVMKQLKRRRYTGWGRLSRKLINGIRDKQSGKTILDFLKSDGFANRNFMQLIHDDSLTFKEDIQKAQVSGQGDSLHEHIANLAGSPAIKKGILQTVKVVDELVKVMGRHKPENIVIEMARENQTTQKGQKNSRERMKRIEEGIKELGSQILKEHPVENTQLQNEKLYLYYLQNGRDMYVDQELDINRLSDYDVDAIVPQSFLKDDSIDNKVLTRSDKNRGKSDNVPSEEVVKKMKNYWRQLLNAKLITQRKFDNLTKAERGGLSELDKAGFIKRQLVETRQITKHVAQILDSRMNTKYDENDKLIREVKVITLKSKLVSDFRKDFQFYKVREINNYHHAHDAYLNAVVGTALIKKYPKLESEFVYGDYKVYDVRKMIAKSEQEIGKATAKYFFYSNIMNFFKTEITLANGEIRKRPLIETNGETGEIVWDKGRDFATVRKVLSMPQVNIVKKTEVQTGGFSKESILPKRNSDKLIARKKDWDPKKYGGFDSPTVAYSVLVVAKVEKGKSKKLKSVKELLGITIMERSSFEKNPIDFLEAKGYKEVKKDLIIKLPKYSLFELENGRKRMLASAGELQKGNELALPSKYVNFLYLASHYEKLKGSPEDNEQKQLFVEQHKHYLDEIIEQISEFSKRVILADANLDKVLSAYNKHRDKPIREQAENIIHLFTLTNLGAPAAFKYFDTTIDRKRYTSTKEVLDATLIHQSITGLYETRIDLSQLGGDSGGSSGGSSGSETPGTSESATPESSGGSSGGSSWLHKFEIKENRWVYIPNEETLQLGQKIHAYIKQKWKYPLYMFHLREGGHVAAANYHIKNKYFCLIDISDFFGATSQSRVTRELGRLIPYVKAREIAKLSTVKNLNGNGLKHVIPYGYPQSPILASLCFHQSFCGGVINTISKSGHVSVSIYMDDILLSSDDMGQLENAFDTVREALRKSGYTVNENKTQSPSTMVNVFNLELSQNSLRVTPKRIVEFLQAFISSSNPHERKGIASYVGSINKSQAKLFRSGGSKRTADGSEFEPKKKRKV

SEQ ID NO: 1747 - protein, 1686 aa, synthetic construct
MKRTADGSEFESPKKKRKVDKKYSIGLDIGTNSVGWAVITDEYKVPSKKFKVLGNTDRHSIKKNLIGALLFDSGETAEATRLKRTARRRYTRRKNRICYLQEIFSNEMAKVDDSFFHRLEESFLVEEDKKHERHPIFGNIVDEVAYHEKYPTIYHLRKKLVDSTDKADLRLIYLALAHMIKFRGHFLIEGDLNPDNSDVDKLFIQLVQTYNQLFEENPINASGVDAKAILSARLSKSRRLENLIAQLPGEKKNGLFGNLIALSLGLTPNFKSNFDLAEDAKLQLSKDTYDDDLDNLLAQIGDQYADLFLAAKNLSDAILLSDILRVNTEITKAPLSASMIKRYDEHHQDLTLLKALVRQQLPEKYKEIFFDQSKNGYAGYIDGGASQEEFYKFIKPILEKMDGTEELLVKLNREDLLRKQRTFDNGSIPHQIHLGELHAILRRQEDFYPFLKDNREKIEKILTFRIPYYVGPLARGNSRFAWMTRKSEETITPWNFEEVVDKGASAQSFIERMTNFDKNLPNEKVLPKHSLLYEYFTVYNELTKVKYVTEGMRKPAFLSGEQKKAIVDLLFKTNRKVTVKQLKEDYFKKIECFDSVEISGVEDRFNASLGTYHDLLKIIKDKDFLDNEENEDILEDIVLTLTLFEDREMIEERLKTYAHLFDDKVMKQLKRRRYTGWGRLSRKLINGIRDKQSGKTILDFLKSDGFANRNFMQLIHDDSLTFKEDIQKAQVSGQGDSLHEHIANLAGSPAIKKGILQTVKVVDELVKVMGRHKPENIVIEMARENQTTQKGQKNSRERMKRIEEGIKELGSQILKEHPVENTQLQNEKLYLYYLQNGRDMYVDQELDINRLSDYDVDAIVPQSFLKDDSIDNKVLTRSDKNRGKSDNVPSEEVVKKMKNYWRQLLNAKLITQRKFDNLTKAERGGLSELDKAGFIKRQLVETRQITKHVAQILDSRMNTKYDENDKLIREVKVITLKSKLVSDFRKDFQFYKVREINNYHHAHDAYLNAVVGTALIKKYPKLESEFVYGDYKVYDVRKMIAKSEQEIGKATAKYFFYSNIMNFFKTEITLANGEIRKRPLIETNGETGEIVWDKGRDFATVRKVLSMPQVNIVKKTEVQTGGFSKESILPKRNSDKLIARKKDWDPKKYGGFDSPTVAYSVLVVAKVEKGKSKKLKSVKELLGITIMERSSFEKNPIDFLEAKGYKEVKKDLIIKLPKYSLFELENGRKRMLASAGELQKGNELALPSKYVNFLYLASHYEKLKGSPEDNEQKQLFVEQHKHYLDEIIEQISEFSKRVILADANLDKVLSAYNKHRDKPIREQAENIIHLFTLTNLGAPAAFKYFDTTIDRKRYTSTKEVLDATLIHQSITGLYETRIDLSQLGGDSGGSSGGSSGSETPGTSESATPESSGGSSGGSSKWIHKFELKPGKWVYVPSRQAAAIGRQIHKTLRKHWTPPEYYFHLRSGGHVEALRFHVDNHFFCHLDIKNFFGSITRSRITRSLKPFLSYPTARDMANQSTVQHPDCKGMRYMLPYGFVQSPLLASICLHQSHLGECLKDLNQNPHLRISIYMDDLVISGNDRDLINEAFADVKKAAKKSHFEFNEMKEQGPQDLITAFNIEISHQCIEITDERMHEFHENYRATDNNHVKRGITNYIRSVNPAQASGGSKRTADGSEFEPKKKRKV

SEQ ID NO: 1748 - protein, 1691 aa, synthetic construct
MKRTADGSEFESPKKKRKVDKKYSIGLDIGTNSVGWAVITDEYKVPSKKFKVLGNTDRHSIKKNLIGALLFDSGETAEATRLKRTARRRYTRRKNRICYLQEIFSNEMAKVDDSFFHRLEESFLVEEDKKHERHPIFGNIVDEVAYHEKYPTIYHLRKKLVDSTDKADLRLIYLALAHMIKFRGHFLIEGDLNPDNSDVDKLFIQLVQTYNQLFEENPINASGVDAKAILSARLSKSRRLENLIAQLPGEKKNGLFGNLIALSLGLTPNFKSNFDLAEDAKLQLSKDTYDDDLDNLLAQIGDQYADLFLAAKNLSDAILLSDILRVNTEITKAPLSASMIKRYDEHHQDLTLLKALVRQQLPEKYKEIFFDQSKNGYAGYIDGGASQEEFYKFIKPILEKMDGTEELLVKLNREDLLRKQRTFDNGSIPHQIHLGELHAILRRQEDFYPFLKDNREKIEKILTFRIPYYVGPLARGNSRFAWMTRKSEETITPWNFEEVVDKGASAQSFIERMTNFDKNLPNEKVLPKHSLLYEYFTVYNELTKVKYVTEGMRKPAFLSGEQKKAIVDLLFKTNRKVTVKQLKEDYFKKIECFDSVEISGVEDRFNASLGTYHDLLKIIKDKDFLDNEENEDILEDIVLTLTLFEDREMIEERLKTYAHLFDDKVMKQLKRRRYTGWGRLSRKLINGIRDKQSGKTILDFLKSDGFANRNFMQLIHDDSLTFKEDIQKAQVSGQGDSLHEHIANLAGSPAIKKGILQTVKVVDELVKVMGRHKPENIVIEMARENQTTQKGQKNSRERMKRIEEGIKELGSQILKEHPVENTQLQNEKLYLYYLQNGRDMYVDQELDINRLSDYDVDAIVPQSFLKDDSIDNKVLTRSDKNRGKSDNVPSEEVVKKMKNYWRQLLNAKLITQRKFDNLTKAERGGLSELDKAGFIKRQLVETRQITKHVAQILDSRMNTKYDENDKLIREVKVITLKSKLVSDFRKDFQFYKVREINNYHHAHDAYLNAVVGTALIKKYPKLESEFVYGDYKVYDVRKMIAKSEQEIGKATAKYFFYSNIMNFFKTEITLANGEIRKRPLIETNGETGEIVWDKGRDFATVRKVLSMPQVNIVKKTEVQTGGFSKESILPKRNSDKLIARKKDWDPKKYGGFDSPTVAYSVLVVAKVEKGKSKKLKSVKELLGITIMERSSFEKNPIDFLEAKGYKEVKKDLIIKLPKYSLFELENGRKRMLASAGELQKGNELALPSKYVNFLYLASHYEKLKGSPEDNEQKQLFVEQHKHYLDEIIEQISEFSKRVILADANLDKVLSAYNKHRDKPIREQAENIIHLFTLTNLGAPAAFKYFDTTIDRKRYTSTKEVLDATLIHQSITGLYETRIDLSQLGGDSGGSSGGSSGSETPGTSESATPESSGGSSGGSSVKWEHKFEIKKDRWVYVPTDEMRLYGEELHNYLRKRWVPPLYFYHLRDGGHVACAKKHLHNEYFALIDIKNFFESTGQSRVTREIKNYFTYNDAREIAKLSTVRNPLPVGPKYIIPYGFPQSPILSTFCLHKSYCGGLFKQIDSNPGIDISIYMDDIIISGNDLELCNLNYKLLCDGLIRSGYEMNENKSQAPSESIHAFNLELKHDSLRVLPFRVIEFLVAYTKSDNPHVRKGIASYVGSINTEQAKLFRSGGSKRTADGSEFEPKKKRKV

SEQ ID NO: 1749 - protein, 1694 aa, synthetic construct
MKRTADGSEFESPKKKRKVDKKYSIGLDIGTNSVGWAVITDEYKVPSKKFKVLGNTDRHSIKKNLIGALLFDSGETAEATRLKRTARRRYTRRKNRICYLQEIFSNEMAKVDDSFFHRLEESFLVEEDKKHERHPIFGNIVDEVAYHEKYPTIYHLRKKLVDSTDKADLRLIYLALAHMIKFRGHFLIEGDLNPDNSDVDKLFIQLVQTYNQLFEENPINASGVDAKAILSARLSKSRRLENLIAQLPGEKKNGLFGNLIALSLGLTPNFKSNFDLAEDAKLQLSKDTYDDDLDNLLAQIGDQYADLFLAAKNLSDAILLSDILRVNTEITKAPLSASMIKRYDEHHQDLTLLKALVRQQLPEKYKEIFFDQSKNGYAGYIDGGASQEEFYKFIKPILEKMDGTEELLVKLNREDLLRKQRTFDNGSIPHQIHLGELHAILRRQEDFYPFLKDNREKIEKILTFRIPYYVGPLARGNSRFAWMTRKSEETITPWNFEEVVDKGASAQSFIERMTNFDKNLPNEKVLPKHSLLYEYFTVYNELTKVKYVTEGMRKPAFLSGEQKKAIVDLLFKTNRKVTVKQLKEDYFKKIECFDSVEISGVEDRFNASLGTYHDLLKIIKDKDFLDNEENEDILEDIVLTLTLFEDREMIEERLKTYAHLFDDKVMKQLKRRRYTGWGRLSRKLINGIRDKQSGKTILDFLKSDGFANRNFMQLIHDDSLTFKEDIQKAQVSGQGDSLHEHIANLAGSPAIKKGILQTVKVVDELVKVMGRHKPENIVIEMARENQTTQKGQKNSRERMKRIEEGIKELGSQILKEHPVENTQLQNEKLYLYYLQNGRDMYVDQELDINRLSDYDVDAIVPQSFLKDDSIDNKVLTRSDKNRGKSDNVPSEEVVKKMKNYWRQLLNAKLITQRKFDNLTKAERGGLSELDKAGFIKRQLVETRQITKHVAQILDSRMNTKYDENDKLIREVKVITLKSKLVSDFRKDFQFYKVREINNYHHAHDAYLNAVVGTALIKKYPKLESEFVYGDYKVYDVRKMIAKSEQEIGKATAKYFFYSNIMNFFKTEITLANGEIRKRPLIETNGETGEIVWDKGRDFATVRKVLSMPQVNIVKKTEVQTGGFSKESILPKRNSDKLIARKKDWDPKKYGGFDSPTVAYSVLVVAKVEKGKSKKLKSVKELLGITIMERSSFEKNPIDFLEAKGYKEVKKDLIIKLPKYSLFELENGRKRMLASAGELQKGNELALPSKYVNFLYLASHYEKLKGSPEDNEQKQLFVEQHKHYLDEIIEQISEFSKRVILADANLDKVLSAYNKHRDKPIREQAENIIHLFTLTNLGAPAAFKYFDTTIDRKRYTSTKEVLDATLIHQSITGLYETRIDLSQLGGDSGGSSGGSSGSETPGTSESATPESSGGSSGGSSNTENEWLHKFEIKPGRWVYIPNEATLKQGKLIHAYIRSKWKSPPYMFHLREGGHVAAANHHVQKKYFALIDIQDFFGATSQSRITRALGNFIPYDKARKIAKLSTVKNQNGNGLKHVIPYGYPQSPILASFCFHQSFCGNIIKNISKSGDIYVSIYMDDILLSGNDLGRLEDTFKAVNEALVKSGYTVNRSKTQLPSTIVNVFNLELSQNSLRISAKRIVDFLQTYISSSHPPEKKGIASYVGSVNKEQARLFKSGGSKRTADGSEFEPKKKRKV

SEQ ID NO: 1750 - protein, 1689 aa, synthetic construct
MKRTADGSEFESPKKKRKVDKKYSIGLDIGTNSVGWAVITDEYKVPSKKFKVLGNTDRHSIKKNLIGALLFDSGETAEATRLKRTARRRYTRRKNRICYLQEIFSNEMAKVDDSFFHRLEESFLVEEDKKHERHPIFGNIVDEVAYHEKYPTIYHLRKKLVDSTDKADLRLIYLALAHMIKFRGHFLIEGDLNPDNSDVDKLFIQLVQTYNQLFEENPINASGVDAKAILSARLSKSRRLENLIAQLPGEKKNGLFGNLIALSLGLTPNFKSNFDLAEDAKLQLSKDTYDDDLDNLLAQIGDQYADLFLAAKNLSDAILLSDILRVNTEITKAPLSASMIKRYDEHHQDLTLLKALVRQQLPEKYKEIFFDQSKNGYAGYIDGGASQEEFYKFIKPILEKMDGTEELLVKLNREDLLRKQRTFDNGSIPHQIHLGELHAILRRQEDFYPFLKDNREKIEKILTFRIPYYVGPLARGNSRFAWMTRKSEETITPWNFEEVVDKGASAQSFIERMTNFDKNLPNEKVLPKHSLLYEYFTVYNELTKVKYVTEGMRKPAFLSGEQKKAIVDLLFKTNRKVTVKQLKEDYFKKIECFDSVEISGVEDRFNASLGTYHDLLKIIKDKDFLDNEENEDILEDIVLTLTLFEDREMIEERLKTYAHLFDDKVMKQLKRRRYTGWGRLSRKLINGIRDKQSGKTILDFLKSDGFANRNFMQLIHDDSLTFKEDIQKAQVSGQGDSLHEHIANLAGSPAIKKGILQTVKVVDELVKVMGRHKPENIVIEMARENQTTQKGQKNSRERMKRIEEGIKELGSQILKEHPVENTQLQNEKLYLYYLQNGRDMYVDQELDINRLSDYDVDAIVPQSFLKDDSIDNKVLTRSDKNRGKSDNVPSEEVVKKMKNYWRQLLNAKLITQRKFDNLTKAERGGLSELDKAGFIKRQLVETRQITKHVAQILDSRMNTKYDENDKLIREVKVITLKSKLVSDFRKDFQFYKVREINNYHHAHDAYLNAVVGTALIKKYPKLESEFVYGDYKVYDVRKMIAKSEQEIGKATAKYFFYSNIMNFFKTEITLANGEIRKRPLIETNGETGEIVWDKGRDFATVRKVLSMPQVNIVKKTEVQTGGFSKESILPKRNSDKLIARKKDWDPKKYGGFDSPTVAYSVLVVAKVEKGKSKKLKSVKELLGITIMERSSFEKNPIDFLEAKGYKEVKKDLIIKLPKYSLFELENGRKRMLASAGELQKGNELALPSKYVNFLYLASHYEKLKGSPEDNEQKQLFVEQHKHYLDEIIEQISEFSKRVILADANLDKVLSAYNKHRDKPIREQAENIIHLFTLTNLGAPAAFKYFDTTIDRKRYTSTKEVLDATLIHQSITGLYETRIDLSQLGGDSGGSSGGSSGSETPGTSESATPESSGGSSGGSSWLHKFEIKENRWVYIPNEETLTLGRKIHAYIKSKWKHPLYMFHLREGGHVAAANYHIQKKYFCLIDISDFFGATSQSRITRELGKFIPYDKAREIAKLSTVKNLNGNGLKHVIPYGYPQSPILASFCFHQSFCGNVINTISKSGNISVSIYMDDILLSSNDMGQLAYAFNSVKQALKKSGYTVNESKTQLPSTSVNVFNLELSQNSLRISPKRIVEFLQAYISSSHPPEKKGIASYVGSVNKTQAKLFQSGGSKRTADGSEFEPKKKRKV

SEQ ID NO: 1751 - protein, 1689 aa, synthetic construct
MKRTADGSEFESPKKKRKVDKKYSIGLDIGTNSVGWAVITDEYKVPSKKFKVLGNTDRHSIKKNLIGALLFDSGETAEATRLKRTARRRYTRRKNRICYLQEIFSNEMAKVDDSFFHRLEESFLVEEDKKHERHPIFGNIVDEVAYHEKYPTIYHLRKKLVDSTDKADLRLIYLALAHMIKFRGHFLIEGDLNPDNSDVDKLFIQLVQTYNQLFEENPINASGVDAKAILSARLSKSRRLENLIAQLPGEKKNGLFGNLIALSLGLTPNFKSNFDLAEDAKLQLSKDTYDDDLDNLLAQIGDQYADLFLAAKNLSDAILLSDILRVNTEITKAPLSASMIKRYDEHHQDLTLLKALVRQQLPEKYKEIFFDQSKNGYAGYIDGGASQEEFYKFIKPILEKMDGTEELLVKLNREDLLRKQRTFDNGSIPHQIHLGELHAILRRQEDFYPFLKDNREKIEKILTFRIPYYVGPLARGNSRFAWMTRKSEETITPWNFEEVVDKGASAQSFIERMTNFDKNLPNEKVLPKHSLLYEYFTVYNELTKVKYVTEGMRKPAFLSGEQKKAIVDLLFKTNRKVTVKQLKEDYFKKIECFDSVEISGVEDRFNASLGTYHDLLKIIKDKDFLDNEENEDILEDIVLTLTLFEDREMIEERLKTYAHLFDDKVMKQLKRRRYTGWGRLSRKLINGIRDKQSGKTILDFLKSDGFANRNFMQLIHDDSLTFKEDIQKAQVSGQGDSLHEHIANLAGSPAIKKGILQTVKVVDELVKVMGRHKPENIVIEMARENQTTQKGQKNSRERMKRIEEGIKELGSQILKEHPVENTQLQNEKLYLYYLQNGRDMYVDQELDINRLSDYDVDAIVPQSFLKDDSIDNKVLTRSDKNRGKSDNVPSEEVVKKMKNYWRQLLNAKLITQRKFDNLTKAERGGLSELDKAGFIKRQLVETRQITKHVAQILDSRMNTKYDENDKLIREVKVITLKSKLVSDFRKDFQFYKVREINNYHHAHDAYLNAVVGTALIKKYPKLESEFVYGDYKVYDVRKMIAKSEQEIGKATAKYFFYSNIMNFFKTEITLANGEIRKRPLIETNGETGEIVWDKGRDFATVRKVLSMPQVNIVKKTEVQTGGFSKESILPKRNSDKLIARKKDWDPKKYGGFDSPTVAYSVLVVAKVEKGKSKKLKSVKELLGITIMERSSFEKNPIDFLEAKGYKEVKKDLIIKLPKYSLFELENGRKRMLASAGELQKGNELALPSKYVNFLYLASHYEKLKGSPEDNEQKQLFVEQHKHYLDEIIEQISEFSKRVILADANLDKVLSAYNKHRDKPIREQAENIIHLFTLTNLGAPAAFKYFDTTIDRKRYTSTKEVLDATLIHQSITGLYETRIDLSQLGGDSGGSSGGSSGSETPGTSESATPESSGGSSGGSSWLHKFEVKENRWVYIPNAETLQLGQKIHTYIKNKWKSPLYMFHLREGGHVAAANYHIQKKYFCLIDISDFFGATSQSRITRELGRLIPYDKAREIAKLSTVKNLNGNGLKHVIPYGYPQSPILASFCFHQSFCGSVINTISKSGNVSVSIYMDDILLSSDDLGQLENAFDMILEALRKSGYTVNENKTQSPSTMVNVFNLELSQNSLRVSSKRIVEFLQAYISSKNPPERKGIASYVGSVNKAQAKLFRSGGSKRTADGSEFEPKKKRKV

SEQ ID NO: 1752 - protein, 1691 aa, synthetic construct
MKRTADGSEFESPKKKRKVDKKYSIGLDIGTNSVGWAVITDEYKVPSKKFKVLGNTDRHSIKKNLIGALLFDSGETAEATRLKRTARRRYTRRKNRICYLQEIFSNEMAKVDDSFFHRLEESFLVEEDKKHERHPIFGNIVDEVAYHEKYPTIYHLRKKLVDSTDKADLRLIYLALAHMIKFRGHFLIEGDLNPDNSDVDKLFIQLVQTYNQLFEENPINASGVDAKAILSARLSKSRRLENLIAQLPGEKKNGLFGNLIALSLGLTPNFKSNFDLAEDAKLQLSKDTYDDDLDNLLAQIGDQYADLFLAAKNLSDAILLSDILRVNTEITKAPLSASMIKRYDEHHQDLTLLKALVRQQLPEKYKEIFFDQSKNGYAGYIDGGASQEEFYKFIKPILEKMDGTEELLVKLNREDLLRKQRTFDNGSIPHQIHLGELHAILRRQEDFYPFLKDNREKIEKILTFRIPYYVGPLARGNSRFAWMTRKSEETITPWNFEEVVDKGASAQSFIERMTNFDKNLPNEKVLPKHSLLYEYFTVYNELTKVKYVTEGMRKPAFLSGEQKKAIVDLLFKTNRKVTVKQLKEDYFKKIECFDSVEISGVEDRFNASLGTYHDLLKIIKDKDFLDNEENEDILEDIVLTLTLFEDREMIEERLKTYAHLFDDKVMKQLKRRRYTGWGRLSRKLINGIRDKQSGKTILDFLKSDGFANRNFMQLIHDDSLTFKEDIQKAQVSGQGDSLHEHIANLAGSPAIKKGILQTVKVVDELVKVMGRHKPENIVIEMARENQTTQKGQKNSRERMKRIEEGIKELGSQILKEHPVENTQLQNEKLYLYYLQNGRDMYVDQELDINRLSDYDVDAIVPQSFLKDDSIDNKVLTRSDKNRGKSDNVPSEEVVKKMKNYWRQLLNAKLITQRKFDNLTKAERGGLSELDKAGFIKRQLVETRQITKHVAQILDSRMNTKYDENDKLIREVKVITLKSKLVSDFRKDFQFYKVREINNYHHAHDAYLNAVVGTALIKKYPKLESEFVYGDYKVYDVRKMIAKSEQEIGKATAKYFFYSNIMNFFKTEITLANGEIRKRPLIETNGETGEIVWDKGRDFATVRKVLSMPQVNIVKKTEVQTGGFSKESILPKRNSDKLIARKKDWDPKKYGGFDSPTVAYSVLVVAKVEKGKSKKLKSVKELLGITIMERSSFEKNPIDFLEAKGYKEVKKDLIIKLPKYSLFELENGRKRMLASAGELQKGNELALPSKYVNFLYLASHYEKLKGSPEDNEQKQLFVEQHKHYLDEIIEQISEFSKRVILADANLDKVLSAYNKHRDKPIREQAENIIHLFTLTNLGAPAAFKYFDTTIDRKRYTSTKEVLDATLIHQSITGLYETRIDLSQLGGDSGGSSGGSSGSETPGTSESATPESSGGSSGGSSDKWEHKFEIKEDQWVYVPTKEMREYGKRLHNHLREKWTPPLYFYHMRDGGHVACAKKHLNNEYFALIDIKNFFESTGQSRVTRELKHYFPYNDARQIAKLSTVRNPMPHGPKYIIPYGYPQSPILSTLCLHKSYCGGLFKQINKSGNIDISIYMDDIIISGNDLNVCAATYTLLCEGLKRSGYQMNSTKSQSPSKKIRVFNLELKHQSLRVLSQRIIEFLIAYTKSTNPHEMKGIASYVGSVNAEQAKLFRSGGSKRTADGSEFEPKKKRKV

SEQ ID NO: 1753 - protein, 1694 aa, synthetic construct
MKRTADGSEFESPKKKRKVDKKYSIGLDIGTNSVGWAVITDEYKVPSKKFKVLGNTDRHSIKKNLIGALLFDSGETAEATRLKRTARRRYTRRKNRICYLQEIFSNEMAKVDDSFFHRLEESFLVEEDKKHERHPIFGNIVDEVAYHEKYPTIYHLRKKLVDSTDKADLRLIYLALAHMIKFRGHFLIEGDLNPDNSDVDKLFIQLVQTYNQLFEENPINASGVDAKAILSARLSKSRRLENLIAQLPGEKKNGLFGNLIALSLGLTPNFKSNFDLAEDAKLQLSKDTYDDDLDNLLAQIGDQYADLFLAAKNLSDAILLSDILRVNTEITKAPLSASMIKRYDEHHQDLTLLKALVRQQLPEKYKEIFFDQSKNGYAGYIDGGASQEEFYKFIKPILEKMDGTEELLVKLNREDLLRKQRTFDNGSIPHQIHLGELHAILRRQEDFYPFLKDNREKIEKILTFRIPYYVGPLARGNSRFAWMTRKSEETITPWNFEEVVDKGASAQSFIERMTNFDKNLPNEKVLPKHSLLYEYFTVYNELTKVKYVTEGMRKPAFLSGEQKKAIVDLLFKTNRKVTVKQLKEDYFKKIECFDSVEISGVEDRFNASLGTYHDLLKIIKDKDFLDNEENEDILEDIVLTLTLFEDREMIEERLKTYAHLFDDKVMKQLKRRRYTGWGRLSRKLINGIRDKQSGKTILDFLKSDGFANRNFMQLIHDDSLTFKEDIQKAQVSGQGDSLHEHIANLAGSPAIKKGILQTVKVVDELVKVMGRHKPENIVIEMARENQTTQKGQKNSRERMKRIEEGIKELGSQILKEHPVENTQLQNEKLYLYYLQNGRDMYVDQELDINRLSDYDVDAIVPQSFLKDDSIDNKVLTRSDKNRGKSDNVPSEEVVKKMKNYWRQLLNAKLITQRKFDNLTKAERGGLSELDKAGFIKRQLVETRQITKHVAQILDSRMNTKYDENDKLIREVKVITLKSKLVSDFRKDFQFYKVREINNYHHAHDAYLNAVVGTALIKKYPKLESEFVYGDYKVYDVRKMIAKSEQEIGKATAKYFFYSNIMNFFKTEITLANGEIRKRPLIETNGETGEIVWDKGRDFATVRKVLSMPQVNIVKKTEVQTGGFSKESILPKRNSDKLIARKKDWDPKKYGGFDSPTVAYSVLVVAKVEKGKSKKLKSVKELLGITIMERSSFEKNPIDFLEAKGYKEVKKDLIIKLPKYSLFELENGRKRMLASAGELQKGNELALPSKYVNFLYLASHYEKLKGSPEDNEQKQLFVEQHKHYLDEIIEQISEFSKRVILADANLDKVLSAYNKHRDKPIREQAENIIHLFTLTNLGAPAAFKYFDTTIDRKRYTSTKEVLDATLIHQSITGLYETRIDLSQLGGDSGGSSGGSSGSETPGTSESATPESSGGSSGGSSSTPSDWLHKFEIKTERWVFVPSKETLERGRQIHAYIKQKWKYPRYMFHLRNGGHVAAANFHLKSNYFSLIDVSDFYGATSQSRVTRELGRLVPYVKARQIARLSTVANPNRNGFKHVIPYGYPQSPILASLCFHHSFCGGVISSISKSERVFVSVYMDDILLSSDDMNLLVEAFDTVRQALRKSGYKVNENKTQSPSPKIQVFNLELGHNHLRVTPKRIVEFLKVFISSANEHERKGIASYVGSINKSQAKLFRSGGSKRTADGSEFEPKKKRKV

SEQ ID NO: 1754 - protein, 1687 aa, synthetic construct
MKRTADGSEFESPKKKRKVDKKYSIGLDIGTNSVGWAVITDEYKVPSKKFKVLGNTDRHSIKKNLIGALLFDSGETAEATRLKRTARRRYTRRKNRICYLQEIFSNEMAKVDDSFFHRLEESFLVEEDKKHERHPIFGNIVDEVAYHEKYPTIYHLRKKLVDSTDKADLRLIYLALAHMIKFRGHFLIEGDLNPDNSDVDKLFIQLVQTYNQLFEENPINASGVDAKAILSARLSKSRRLENLIAQLPGEKKNGLFGNLIALSLGLTPNFKSNFDLAEDAKLQLSKDTYDDDLDNLLAQIGDQYADLFLAAKNLSDAILLSDILRVNTEITKAPLSASMIKRYDEHHQDLTLLKALVRQQLPEKYKEIFFDQSKNGYAGYIDGGASQEEFYKFIKPILEKMDGTEELLVKLNREDLLRKQRTFDNGSIPHQIHLGELHAILRRQEDFYPFLKDNREKIEKILTFRIPYYVGPLARGNSRFAWMTRKSEETITPWNFEEVVDKGASAQSFIERMTNFDKNLPNEKVLPKHSLLYEYFTVYNELTKVKYVTEGMRKPAFLSGEQKKAIVDLLFKTNRKVTVKQLKEDYFKKIECFDSVEISGVEDRFNASLGTYHDLLKIIKDKDFLDNEENEDILEDIVLTLTLFEDREMIEERLKTYAHLFDDKVMKQLKRRRYTGWGRLSRKLINGIRDKQSGKTILDFLKSDGFANRNFMQLIHDDSLTFKEDIQKAQVSGQGDSLHEHIANLAGSPAIKKGILQTVKVVDELVKVMGRHKPENIVIEMARENQTTQKGQKNSRERMKRIEEGIKELGSQILKEHPVENTQLQNEKLYLYYLQNGRDMYVDQELDINRLSDYDVDAIVPQSFLKDDSIDNKVLTRSDKNRGKSDNVPSEEVVKKMKNYWRQLLNAKLITQRKFDNLTKAERGGLSELDKAGFIKRQLVETRQITKHVAQILDSRMNTKYDENDKLIREVKVITLKSKLVSDFRKDFQFYKVREINNYHHAHDAYLNAVVGTALIKKYPKLESEFVYGDYKVYDVRKMIAKSEQEIGKATAKYFFYSNIMNFFKTEITLANGEIRKRPLIETNGETGEIVWDKGRDFATVRKVLSMPQVNIVKKTEVQTGGFSKESILPKRNSDKLIARKKDWDPKKYGGFDSPTVAYSVLVVAKVEKGKSKKLKSVKELLGITIMERSSFEKNPIDFLEAKGYKEVKKDLIIKLPKYSLFELENGRKRMLASAGELQKGNELALPSKYVNFLYLASHYEKLKGSPEDNEQKQLFVEQHKHYLDEIIEQISEFSKRVILADANLDKVLSAYNKHRDKPIREQAENIIHLFTLTNLGAPAAFKYFDTTIDRKRYTSTKEVLDATLIHQSITGLYETRIDLSQLGGDSGGSSGGSSGSETPGTSESATPESSGGSSGGSSWEHKFELKENKWVHIPTEEMIKFGKKLHQYIRKKWKAPLYYYHLRNGGHVAAAKLHTGNDYFCLIDIKNFFECTSQSRVTRELKKIIPYEQARQIAKLSTVRIPNAQPHKFAVPYGYPQSPILATLCLHNSYAGGVIDSIHKSGCVTVSVYMDDIILSSKDLATLNQEFDILCNALVKSRYEVNTSKTQHPAPEISVFNLELSHNHLKVAPERMVQFIQAYAKSDNEHEREGIARYVHSVNPDQARRSGGSKRTADGSEFEPKKKRKV

SEQ ID NO: 1755 - protein, 1686 aa, synthetic construct
MKRTADGSEFESPKKKRKVDKKYSIGLDIGTNSVGWAVITDEYKVPSKKFKVLGNTDRHSIKKNLIGALLFDSGETAEATRLKRTARRRYTRRKNRICYLQEIFSNEMAKVDDSFFHRLEESFLVEEDKKHERHPIFGNIVDEVAYHEKYPTIYHLRKKLVDSTDKADLRLIYLALAHMIKFRGHFLIEGDLNPDNSDVDKLFIQLVQTYNQLFEENPINASGVDAKAILSARLSKSRRLENLIAQLPGEKKNGLFGNLIALSLGLTPNFKSNFDLAEDAKLQLSKDTYDDDLDNLLAQIGDQYADLFLAAKNLSDAILLSDILRVNTEITKAPLSASMIKRYDEHHQDLTLLKALVRQQLPEKYKEIFFDQSKNGYAGYIDGGASQEEFYKFIKPILEKMDGTEELLVKLNREDLLRKQRTFDNGSIPHQIHLGELHAILRRQEDFYPFLKDNREKIEKILTFRIPYYVGPLARGNSRFAWMTRKSEETITPWNFEEVVDKGASAQSFIERMTNFDKNLPNEKVLPKHSLLYEYFTVYNELTKVKYVTEGMRKPAFLSGEQKKAIVDLLFKTNRKVTVKQLKEDYFKKIECFDSVEISGVEDRFNASLGTYHDLLKIIKDKDFLDNEENEDILEDIVLTLTLFEDREMIEERLKTYAHLFDDKVMKQLKRRRYTGWGRLSRKLINGIRDKQSGKTILDFLKSDGFANRNFMQLIHDDSLTFKEDIQKAQVSGQGDSLHEHIANLAGSPAIKKGILQTVKVVDELVKVMGRHKPENIVIEMARENQTTQKGQKNSRERMKRIEEGIKELGSQILKEHPVENTQLQNEKLYLYYLQNGRDMYVDQELDINRLSDYDVDAIVPQSFLKDDSIDNKVLTRSDKNRGKSDNVPSEEVVKKMKNYWRQLLNAKLITQRKFDNLTKAERGGLSELDKAGFIKRQLVETRQITKHVAQILDSRMNTKYDENDKLIREVKVITLKSKLVSDFRKDFQFYKVREINNYHHAHDAYLNAVVGTALIKKYPKLESEFVYGDYKVYDVRKMIAKSEQEIGKATAKYFFYSNIMNFFKTEITLANGEIRKRPLIETNGETGEIVWDKGRDFATVRKVLSMPQVNIVKKTEVQTGGFSKESILPKRNSDKLIARKKDWDPKKYGGFDSPTVAYSVLVVAKVEKGKSKKLKSVKELLGITIMERSSFEKNPIDFLEAKGYKEVKKDLIIKLPKYSLFELENGRKRMLASAGELQKGNELALPSKYVNFLYLASHYEKLKGSPEDNEQKQLFVEQHKHYLDEIIEQISEFSKRVILADANLDKVLSAYNKHRDKPIREQAENIIHLFTLTNLGAPAAFKYFDTTIDRKRYTSTKEVLDATLIHQSITGLYETRIDLSQLGGDSGGSSGGSSGSETPGTSESATPESSGGSSGGSSRWIHKFELKKDRWVYVPSEACRNEGVEILNYLNRKWTPPVYYYHLRKGGHIEALKVHLENDWFTHIDIKGFFNSTSRSRVTRTLKEFYPYEKARNIAKMSTVKNFTNDKFSHILPFGFVQSPMLATLCLHKSYLGNLIRELFNCKDIKISVYMDDIIISSSDKELLDEIYCELMECVVKSHYYIPEKKQPPSDRITVFNIDLSHQSMRITQKRMLDFLIEYTKTKSDHVKEGIRSYVKTVNLEQYESGGSKRTADGSEFEPKKKRKV

SEQ ID NO: 1756 - protein, 1685 aa, synthetic construct
MKRTADGSEFESPKKKRKVDKKYSIGLDIGTNSVGWAVITDEYKVPSKKFKVLGNTDRHSIKKNLIGALLFDSGETAEATRLKRTARRRYTRRKNRICYLQEIFSNEMAKVDDSFFHRLEESFLVEEDKKHERHPIFGNIVDEVAYHEKYPTIYHLRKKLVDSTDKADLRLIYLALAHMIKFRGHFLIEGDLNPDNSDVDKLFIQLVQTYNQLFEENPINASGVDAKAILSARLSKSRRLENLIAQLPGEKKNGLFGNLIALSLGLTPNFKSNFDLAEDAKLQLSKDTYDDDLDNLLAQIGDQYADLFLAAKNLSDAILLSDILRVNTEITKAPLSASMIKRYDEHHQDLTLLKALVRQQLPEKYKEIFFDQSKNGYAGYIDGGASQEEFYKFIKPILEKMDGTEELLVKLNREDLLRKQRTFDNGSIPHQIHLGELHAILRRQEDFYPFLKDNREKIEKILTFRIPYYVGPLARGNSRFAWMTRKSEETITPWNFEEVVDKGASAQSFIERMTNFDKNLPNEKVLPKHSLLYEYFTVYNELTKVKYVTEGMRKPAFLSGEQKKAIVDLLFKTNRKVTVKQLKEDYFKKIECFDSVEISGVEDRFNASLGTYHDLLKIIKDKDFLDNEENEDILEDIVLTLTLFEDREMIEERLKTYAHLFDDKVMKQLKRRRYTGWGRLSRKLINGIRDKQSGKTILDFLKSDGFANRNFMQLIHDDSLTFKEDIQKAQVSGQGDSLHEHIANLAGSPAIKKGILQTVKVVDELVKVMGRHKPENIVIEMARENQTTQKGQKNSRERMKRIEEGIKELGSQILKEHPVENTQLQNEKLYLYYLQNGRDMYVDQELDINRLSDYDVDAIVPQSFLKDDSIDNKVLTRSDKNRGKSDNVPSEEVVKKMKNYWRQLLNAKLITQRKFDNLTKAERGGLSELDKAGFIKRQLVETRQITKHVAQILDSRMNTKYDENDKLIREVKVITLKSKLVSDFRKDFQFYKVREINNYHHAHDAYLNAVVGTALIKKYPKLESEFVYGDYKVYDVRKMIAKSEQEIGKATAKYFFYSNIMNFFKTEITLANGEIRKRPLIETNGETGEIVWDKGRDFATVRKVLSMPQVNIVKKTEVQTGGFSKESILPKRNSDKLIARKKDWDPKKYGGFDSPTVAYSVLVVAKVEKGKSKKLKSVKELLGITIMERSSFEKNPIDFLEAKGYKEVKKDLIIKLPKYSLFELENGRKRMLASAGELQKGNELALPSKYVNFLYLASHYEKLKGSPEDNEQKQLFVEQHKHYLDEIIEQISEFSKRVILADANLDKVLSAYNKHRDKPIREQAENIIHLFTLTNLGAPAAFKYFDTTIDRKRYTSTKEVLDATLIHQSITGLYETRIDLSQLGGDSGGSSGGSSGSETPGTSESATPESSGGSSGGSSKWTHRFERKPGRWVFVPTDEARAQGREIKGLIEGLWKAPDYYFHLRSGGHVAALREHQASQCFLKVDIEDFFGSVSRNRITRVLKGYVSHAEARRWATESTVRHPADPGRTILPYGFVQSPLLASLVLHDTGLGRYLDQLSKEPGLVVTVYVDDIIVSCHDMEELEDVLTEMKTAAQRSRFALSDEKQQGPAPTITAFNIELAGTPLEVSPARMAEFREALQTTTSERQRAGIQNYVRQVNAVQASGGSKRTADGSEFEPKKKRKV

SEQ ID NO: 1757 - protein, 1679 aa, synthetic construct
MKRTADGSEFESPKKKRKVDKKYSIGLDIGTNSVGWAVITDEYKVPSKKFKVLGNTDRHSIKKNLIGALLFDSGETAEATRLKRTARRRYTRRKNRICYLQEIFSNEMAKVDDSFFHRLEESFLVEEDKKHERHPIFGNIVDEVAYHEKYPTIYHLRKKLVDSTDKADLRLIYLALAHMIKFRGHFLIEGDLNPDNSDVDKLFIQLVQTYNQLFEENPINASGVDAKAILSARLSKSRRLENLIAQLPGEKKNGLFGNLIALSLGLTPNFKSNFDLAEDAKLQLSKDTYDDDLDNLLAQIGDQYADLFLAAKNLSDAILLSDILRVNTEITKAPLSASMIKRYDEHHQDLTLLKALVRQQLPEKYKEIFFDQSKNGYAGYIDGGASQEEFYKFIKPILEKMDGTEELLVKLNREDLLRKQRTFDNGSIPHQIHLGELHAILRRQEDFYPFLKDNREKIEKILTFRIPYYVGPLARGNSRFAWMTRKSEETITPWNFEEVVDKGASAQSFIERMTNFDKNLPNEKVLPKHSLLYEYFTVYNELTKVKYVTEGMRKPAFLSGEQKKAIVDLLFKTNRKVTVKQLKEDYFKKIECFDSVEISGVEDRFNASLGTYHDLLKIIKDKDFLDNEENEDILEDIVLTLTLFEDREMIEERLKTYAHLFDDKVMKQLKRRRYTGWGRLSRKLINGIRDKQSGKTILDFLKSDGFANRNFMQLIHDDSLTFKEDIQKAQVSGQGDSLHEHIANLAGSPAIKKGILQTVKVVDELVKVMGRHKPENIVIEMARENQTTQKGQKNSRERMKRIEEGIKELGSQILKEHPVENTQLQNEKLYLYYLQNGRDMYVDQELDINRLSDYDVDAIVPQSFLKDDSIDNKVLTRSDKNRGKSDNVPSEEVVKKMKNYWRQLLNAKLITQRKFDNLTKAERGGLSELDKAGFIKRQLVETRQITKHVAQILDSRMNTKYDENDKLIREVKVITLKSKLVSDFRKDFQFYKVREINNYHHAHDAYLNAVVGTALIKKYPKLESEFVYGDYKVYDVRKMIAKSEQEIGKATAKYFFYSNIMNFFKTEITLANGEIRKRPLIETNGETGEIVWDKGRDFATVRKVLSMPQVNIVKKTEVQTGGFSKESILPKRNSDKLIARKKDWDPKKYGGFDSPTVAYSVLVVAKVEKGKSKKLKSVKELLGITIMERSSFEKNPIDFLEAKGYKEVKKDLIIKLPKYSLFELENGRKRMLASAGELQKGNELALPSKYVNFLYLASHYEKLKGSPEDNEQKQLFVEQHKHYLDEIIEQISEFSKRVILADANLDKVLSAYNKHRDKPIREQAENIIHLFTLTNLGAPAAFKYFDTTIDRKRYTSTKEVLDATLIHQSITGLYETRIDLSQLGGDSGGSSGGSSGSETPGTSESATPESSGGSSGGSSRFTLPPGTQVYIPTEHGRERGTEIKKQVEGRWKPPANYFHLLEGGHVAAVRTHHNQPWIASLDLQRFFDQITRTRVHRALKRIGMPQQDAWEMACDSTVDKDPPNRHFSLPFGFVQSPILASVVLAQSALGGAIRNLRKGGLTVTVYVDDITISGDDEEQVFAAVDQLETGAELAGFAFNEEKTQGPAGEVTSFNIAFGSGRMEVTEDRMAEFEAAIRNGSEWQIEGILGYVGSVNAGQSGGSKRTADGSEFEPKKKRKV

SEQ ID NO: 1758 - protein, 1689 aa, synthetic construct
MKRTADGSEFESPKKKRKVDKKYSIGLDIGTNSVGWAVITDEYKVPSKKFKVLGNTDRHSIKKNLIGALLFDSGETAEATRLKRTARRRYTRRKNRICYLQEIFSNEMAKVDDSFFHRLEESFLVEEDKKHERHPIFGNIVDEVAYHEKYPTIYHLRKKLVDSTDKADLRLIYLALAHMIKFRGHFLIEGDLNPDNSDVDKLFIQLVQTYNQLFEENPINASGVDAKAILSARLSKSRRLENLIAQLPGEKKNGLFGNLIALSLGLTPNFKSNFDLAEDAKLQLSKDTYDDDLDNLLAQIGDQYADLFLAAKNLSDAILLSDILRVNTEITKAPLSASMIKRYDEHHQDLTLLKALVRQQLPEKYKEIFFDQSKNGYAGYIDGGASQEEFYKFIKPILEKMDGTEELLVKLNREDLLRKQRTFDNGSIPHQIHLGELHAILRRQEDFYPFLKDNREKIEKILTFRIPYYVGPLARGNSRFAWMTRKSEETITPWNFEEVVDKGASAQSFIERMTNFDKNLPNEKVLPKHSLLYEYFTVYNELTKVKYVTEGMRKPAFLSGEQKKAIVDLLFKTNRKVTVKQLKEDYFKKIECFDSVEISGVEDRFNASLGTYHDLLKIIKDKDFLDNEENEDILEDIVLTLTLFEDREMIEERLKTYAHLFDDKVMKQLKRRRYTGWGRLSRKLINGIRDKQSGKTILDFLKSDGFANRNFMQLIHDDSLTFKEDIQKAQVSGQGDSLHEHIANLAGSPAIKKGILQTVKVVDELVKVMGRHKPENIVIEMARENQTTQKGQKNSRERMKRIEEGIKELGSQILKEHPVENTQLQNEKLYLYYLQNGRDMYVDQELDINRLSDYDVDAIVPQSFLKDDSIDNKVLTRSDKNRGKSDNVPSEEVVKKMKNYWRQLLNAKLITQRKFDNLTKAERGGLSELDKAGFIKRQLVETRQITKHVAQILDSRMNTKYDENDKLIREVKVITLKSKLVSDFRKDFQFYKVREINNYHHAHDAYLNAVVGTALIKKYPKLESEFVYGDYKVYDVRKMIAKSEQEIGKATAKYFFYSNIMNFFKTEITLANGEIRKRPLIETNGETGEIVWDKGRDFATVRKVLSMPQVNIVKKTEVQTGGFSKESILPKRNSDKLIARKKDWDPKKYGGFDSPTVAYSVLVVAKVEKGKSKKLKSVKELLGITIMERSSFEKNPIDFLEAKGYKEVKKDLIIKLPKYSLFELENGRKRMLASAGELQKGNELALPSKYVNFLYLASHYEKLKGSPEDNEQKQLFVEQHKHYLDEIIEQISEFSKRVILADANLDKVLSAYNKHRDKPIREQAENIIHLFTLTNLGAPAAFKYFDTTIDRKRYTSTKEVLDATLIHQSITGLYETRIDLSQLGGDSGGSSGGSSGSETPGTSESATPESSGGSSGGSSWLHRFEVKPDRWVYIPNEETLAQGGGIHAYIRQKWKHPLYMFHLREGGHVAAANHHLQKKYFCLIDIQDFFGATSQSRITRELGRLIPYDKAREIAKLSTIKNQNGNGLKHVIPYGYPQSPILASFCFHHSFCGGVINNINKSGDVSVTIYMDDILLSGNDMGRLEDTFDNVNQALDRSCYTVNENKTQLPSHTVNVFNLELSHNSLRISPKRMVDFLQAYISSSHPPERKGIASYVGSVNKEQARLFRSGGSKRTADGSEFEPKKKRKV

SEQ ID NO: 1759-1761 - skipped (3 entries)

SEQ ID NO: 1762 - RNA, 42 nt, synthetic construct
  source 1..42: mol_type = other RNA
ttgacgcggttctatctacttacgcgttaaaccaactagaaa

SEQ ID NO: 1763 - skipped

SEQ ID NO: 1764 - protein, 10 aa, synthetic construct
SGGSGGSGGS

SEQ ID NO: 1765 - protein, 9 aa, synthetic construct
RRRRRRRRR